United States Patent Application Publication US 2017/0268071 A1 - sequence listing, part 2

SEQ ID NO: 32746 - DNA, 21 bp, Artificial Sequence
  Probe
ggttgtagtccgtgcgagaat

SEQ ID NO: 32747 - DNA, 22 bp, Artificial Sequence
  Probe
ggttgtagtccgtgcgagaata

SEQ ID NO: 32748 - DNA, 19 bp, Artificial Sequence
  Probe
ggtttaagtcccattggtc

SEQ ID NO: 32749 - DNA, 34 bp, Artificial Sequence
  Probe
ggtttccgtagtgtagcggttatcacattcgcct

SEQ ID NO: 32750 - DNA, 34 bp, Artificial Sequence
  Probe
ggtttccgtagtgtagtggtcatcacgttcgcct

SEQ ID NO: 32751 - DNA, 33 bp, Artificial Sequence
  Probe
ggtttccgtagtgtagtggttatcacgttcgcc

SEQ ID NO: 32752 - DNA, 34 bp, Artificial Sequence; identical to SEQ ID NO: 22371
  Probe

SEQ ID NO: 32753 - DNA, 36 bp, Artificial Sequence
  Probe
ggtttccgtagtgtagtggttatcacgttcgcctaa

SEQ ID NO: 32754 - DNA, 37 bp, Artificial Sequence
  Probe
ggtttccgtagtgtagtggttatcacgttcgcctaac

SEQ ID NO: 32755 - DNA, 35 bp, Artificial Sequence
  Probe
ggtttccgtagtgtagtggttatcacgttcgcctc

SEQ ID NO: 32756 - DNA, 36 bp, Artificial Sequence; identical to SEQ ID NO: 22372
  Probe

SEQ ID NO: 32757 - DNA, 37 bp, Artificial Sequence
  Probe
ggtttccgtagtgtagtggttatcacgttcgcctcac

SEQ ID NO: 32758 - DNA, 34 bp, Artificial Sequence
  Probe
ggtttccgtggtgtagtggttatcacattcgcct

SEQ ID NO: 32759 - DNA, 15 bp, Artificial Sequence
  Probe
ggtttggtcctagcc

SEQ ID NO: 32760 - DNA, 16 bp, Artificial Sequence
  Probe
ggtttggtcctagcct

SEQ ID NO: 32761 - DNA, 26 bp, Artificial Sequence
  Probe
ggtttggtcctagcctttctattagc

SEQ ID NO: 32762 - DNA, 20 bp, Artificial Sequence
  Probe
ggtttttcatatcattggtc

SEQ ID NO: 32763 - DNA, 21 bp, Artificial Sequence
  Probe
ggtttttcatatcattggtcg

SEQ ID NO: 32764 - DNA, 26 bp, Artificial Sequence
  Probe
ggtttttcatatcattggtcgtggtt

SEQ ID NO: 32765 - DNA, 27 bp, Artificial Sequence
  Probe
ggtttttcatatcattggtcgtggttg

SEQ ID NO: 32766 - DNA, 29 bp, Artificial Sequence
  Probe
ggtttttcatatcattggtcgtggttgta

SEQ ID NO: 32767 - DNA, 30 bp, Artificial Sequence; identical to SEQ ID NO: 11147
  Probe

SEQ ID NO: 32768 - DNA, 31 bp, Artificial Sequence
  Probe
ggtttttcatatcattggtcgtggttgtagt

SEQ ID NO: 32769 - DNA, 34 bp, Artificial Sequence
  Probe
ggtttttcatatcattggtcgtggttgtagtccg

SEQ ID NO: 32770 - DNA, 35 bp, Artificial Sequence
  Probe
ggtttttcatatcattggtcgtggttgtagtccgt

SEQ ID NO: 32771 - DNA, 37 bp, Artificial Sequence
  Probe
ggtttttcatatcattggtcgtggttgtagtccgtgc

SEQ ID NO: 32772 - DNA, 38 bp, Artificial Sequence; identical to SEQ ID NO: 6871
  Probe

SEQ ID NO: 32773 - DNA, 39 bp, Artificial Sequence
  Probe
ggtttttcatatcattggtcgtggttgtagtccgtgcga

SEQ ID NO: 32774 - DNA, 40 bp, Artificial Sequence
  Probe
ggtttttcatatcattggtcgtggttgtagtccgtgcgag

SEQ ID NO: 32775 - DNA, 43 bp, Artificial Sequence
  Probe
ggtttttcatatcattggtcgtggttgtagtccgtgcgagaat

SEQ ID NO: 32776 - DNA, 44 bp, Artificial Sequence
  Probe
ggtttttcatatcattggtcgtggttgtagtccgtgcgagaata

SEQ ID NO: 32777 - DNA, 46 bp, Artificial Sequence
  Probe
ggtttttcatatcattggtcgtggttgtagtccgtgcgagaataat

SEQ ID NO: 32778 - DNA, 17 bp, Artificial Sequence
  Probe
gtaaaccaggggtcgcg

SEQ ID NO: 32779 - DNA, 18 bp, Artificial Sequence
  Probe
gtaaaccaggggtcgcga

SEQ ID NO: 32780 - DNA, 19 bp, Artificial Sequence
  Probe
gtaaaccaggggtcgcgag

SEQ ID NO: 32781 - DNA, 21 bp, Artificial Sequence
  Probe
gtaaaccaggggtcgcgagtt

SEQ ID NO: 32782 - DNA, 19 bp, Artificial Sequence
  Probe
gtaaaccggagatgaaaac

SEQ ID NO: 32783 - DNA, 20 bp, Artificial Sequence
  Probe
gtaaaccggagatgaaaacc

SEQ ID NO: 32784 - DNA, 21 bp, Artificial Sequence
  Probe
gtaaaccggagatgaaaacct

SEQ ID NO: 32785 - DNA, 16 bp, Artificial Sequence
  Probe
gtaaagaggagttgtt

SEQ ID NO: 32786 - DNA, 16 bp, Artificial Sequence
  Probe
gtaaataataggagct

SEQ ID NO: 32787 - DNA, 17 bp, Artificial Sequence
  Probe
gtaaataataggagctt

SEQ ID NO: 32788 - DNA, 22 bp, Artificial Sequence
  Probe
gtaaataataggagcttaaacc

SEQ ID NO: 32789 - DNA, 23 bp, Artificial Sequence
  Probe
gtaaataataggagcttaaaccc

SEQ ID NO: 32790 - DNA, 36 bp, Artificial Sequence
  Probe
gtaaatatagtttaaccaaaacatcagattgtgaat

SEQ ID NO: 32791 - DNA, 50 bp, Artificial Sequence; identical to SEQ ID NO: 6887
  Probe

SEQ ID NO: 32792 - DNA, 19 bp, Artificial Sequence
  Probe
gtaagcaccttgcctgcgg

SEQ ID NO: 32793 - DNA, 20 bp, Artificial Sequence
  Probe
gtaagcaccttgcctgcggg

SEQ ID NO: 32794 - DNA, 21 bp, Artificial Sequence
  Probe
gtaagcaccttgcctgcgggc

SEQ ID NO: 32795 - DNA, 22 bp, Artificial Sequence
  Probe
gtaagcaccttgcctgcgggct

SEQ ID NO: 32796 - DNA, 23 bp, Artificial Sequence
  Probe
gtaagcaccttgcctgcgggctt

SEQ ID NO: 32797 - DNA, 20 bp, Artificial Sequence
  Probe
gtaagccgttttaaaaactg

SEQ ID NO: 32798 - DNA, 21 bp, Artificial Sequence
  Probe
gtaagccgttttaaaaactgt

SEQ ID NO: 32799 - DNA, 22 bp, Artificial Sequence
  Probe
gtaagccgttttaaaaactgtt

SEQ ID NO: 32800 - DNA, 16 bp, Artificial Sequence
  Probe
gtaaggcggctgtttt

SEQ ID NO: 32801 - DNA, 17 bp, Artificial Sequence
  Probe
gtaaggcggctgttttt

SEQ ID NO: 32802 - DNA, 28 bp, Artificial Sequence
  Probe
gtaaggtcagctaaataagctatcgggc

SEQ ID NO: 32803 - DNA, 29 bp, Artificial Sequence
  Probe
gtaaggtcagctaaataagctatcgggcc

SEQ ID NO: 32804 - DNA, 30 bp, Artificial Sequence; identical to SEQ ID NO: 6891
  Probe

SEQ ID NO: 32805 - DNA, 31 bp, Artificial Sequence; identical to SEQ ID NO: 6892
  Probe

SEQ ID NO: 32806 - DNA, 33 bp, Artificial Sequence; identical to SEQ ID NO: 6894
  Probe

SEQ ID NO: 32807 - DNA, 36 bp, Artificial Sequence; identical to SEQ ID NO: 6897
  Probe

SEQ ID NO: 32808 - DNA, 36 bp, Artificial Sequence
  Probe
gtaatcgcataaaacttaaaactttacagtcagagg

SEQ ID NO: 32809 - DNA, 16 bp, Artificial Sequence
  Probe
gtaatggttagcactc

SEQ ID NO: 32810 - DNA, 19 bp, Artificial Sequence
  Probe
gtaatggttagcactctgg

SEQ ID NO: 32811 - DNA, 20 bp, Artificial Sequence
  Probe
gtaatggttagcactctgga

SEQ ID NO: 32812 - DNA, 22 bp, Artificial Sequence
  Probe
gtaatggttagcactctggact

SEQ ID NO: 32813 - DNA, 23 bp, Artificial Sequence
  Probe
gtaatggttagcactctggactc

SEQ ID NO: 32814 - DNA, 27 bp, Artificial Sequence
  Probe
gtaatggttagcactctggactctgaa

SEQ ID NO: 32815 - DNA, 28 bp, Artificial Sequence
  Probe
gtaatggttagcactctggactctgaat

SEQ ID NO: 32816 - DNA, 29 bp, Artificial Sequence
  Probe
gtaatggttagcactctggactctgaatc

SEQ ID NO: 32817 - DNA, 41 bp, Artificial Sequence
  Probe
gtaatggttagcactctggactctgaatccagcgatccgag

SEQ ID NO: 32818 - DNA, 43 bp, Artificial Sequence
  Probe
gtaatggttagcactctggactctgaatccagcgatccgagtt

SEQ ID NO: 32819 - DNA, 36 bp, Artificial Sequence
  Probe
gtaatggttagcactctggactttgaatccagcgat

SEQ ID NO: 32820 - DNA, 15 bp, Artificial Sequence
  Probe
gtaccgttaacttcc

SEQ ID NO: 32821 - DNA, 36 bp, Artificial Sequence
  Probe
gtacctgtctctgtggcgcaatcggttagcgcgttc

SEQ ID NO: 32822 - DNA, 27 bp, Artificial Sequence
  Probe
gtacgcgaggcattggtggttcagtgg

SEQ ID NO: 32823 - DNA, 21 bp, Artificial Sequence
  Probe
gtacgggccaggattgaaact

SEQ ID NO: 32824 - DNA, 22 bp, Artificial Sequence
  Probe
gtacgggccaggattgaaactt

SEQ ID NO: 32825 - DNA, 23 bp, Artificial Sequence
  Probe
gtacgggccaggattgaaacttt

SEQ ID NO: 32826 - DNA, 24 bp, Artificial Sequence
  Probe
gtacgggccaggattgaaactttt

SEQ ID NO: 32827 - DNA, 22 bp, Artificial Sequence
  Probe
gtactggaaagtgcacttggac

SEQ ID NO: 32828 - DNA, 23 bp, Artificial Sequence
  Probe
gtactggaaagtgcacttggacg

SEQ ID NO: 32829 - DNA, 27 bp, Artificial Sequence
  Probe
gtactggaaagtgcacttggacgaacc

SEQ ID NO: 32830 - DNA, 15 bp, Artificial Sequence
  Probe
gtagaattctcgcct

SEQ ID NO: 32831 - DNA, 17 bp, Artificial Sequence
  Probe
gtagaattctcgcctcc

SEQ ID NO: 32832 - DNA, 18 bp, Artificial Sequence
  Probe
gtagaattctcgcctccc

SEQ ID NO: 32833 - DNA, 33 bp, Artificial Sequence
  Probe
gtagaattctcgcctcccacgcgggagacccgg

SEQ ID NO: 32834 - DNA, 34 bp, Artificial Sequence
  Probe
gtagaattctcgcctcccacgcgggagacccggg

SEQ ID NO: 32835 - DNA, 35 bp, Artificial Sequence
  Probe
gtagaattctcgcctcccacgcgggagacccgggt

SEQ ID NO: 32836 - DNA, 16 bp, Artificial Sequence
  Probe
gtagaattctcgcctg

SEQ ID NO: 32837 - DNA, 17 bp, Artificial Sequence
  Probe
gtagaattctcgcctgc

SEQ ID NO: 32838 - DNA, 18 bp, Artificial Sequence
  Probe
gtagaattctcgcctgcc

SEQ ID NO: 32839 - DNA, 19 bp, Artificial Sequence
  Probe
gtagaattctcgcctgcca

SEQ ID NO: 32840 - DNA, 20 bp, Artificial Sequence
  Probe
gtagaattctcgcctgccac

SEQ ID NO: 32841 - DNA, 21 bp, Artificial Sequence
  Probe
gtagaattctcgcctgccacg

SEQ ID NO: 32842 - DNA, 22 bp, Artificial Sequence
  Probe
gtagaattctcgcctgccacgc

SEQ ID NO: 32843 - DNA, 24 bp, Artificial Sequence
  Probe
gtagaattctcgcctgccacgcgg

SEQ ID NO: 32844 - DNA, 25 bp, Artificial Sequence
  Probe
gtagaattctcgcctgccacgcggg

SEQ ID NO: 32845 - DNA, 26 bp, Artificial Sequence
  Probe
gtagaattctcgcctgccacgcggga

SEQ ID NO: 32846 - DNA, 30 bp, Artificial Sequence; identical to SEQ ID NO: 11172
  Probe

SEQ ID NO: 32847 - DNA, 32 bp, Artificial Sequence
  Probe
gtagaattctcgcctgccacgcgggaggcccg

SEQ ID NO: 32848 - DNA, 37 bp, Artificial Sequence
  Probe
gtagaattctcgcctgccacgcgggaggcccgggttt

SEQ ID NO: 32849 - DNA, 32 bp, Artificial Sequence
  Probe
gtagagagcctggatagctcagtcggtagagc

SEQ ID NO: 32850 - DNA, 33 bp, Artificial Sequence
  Probe
gtagagagcctggatagctcagtcggtagagca

SEQ ID NO: 32851 - DNA, 35 bp, Artificial Sequence
  Probe
gtagagagcctggatagctcagtcggtagagcatc

SEQ ID NO: 32852 - DNA, 36 bp, Artificial Sequence
  Probe
gtagagagcctggatagctcagtcggtagagcatca

SEQ ID NO: 32853 - DNA, 39 bp, Artificial Sequence
  Probe
gtagagagcctggatagctcagtcggtagagcatcagac

SEQ ID NO: 32854 - DNA, 40 bp, Artificial Sequence
  Probe
gtagagagcctggatagctcagtcggtagagcatcagact

SEQ ID NO: 32855 - DNA, 15 bp, Artificial Sequence
  Probe
gtagagcatcagact

SEQ ID NO: 32856 - DNA, 16 bp, Artificial Sequence
  Probe
gtagagcatgagaccc

SEQ ID NO: 32857 - DNA, 15 bp, Artificial Sequence
  Probe
gtagagcatgagact

SEQ ID NO: 32858 - DNA, 16 bp, Artificial Sequence
  Probe
gtagagcatgagactc

SEQ ID NO: 32859 - DNA, 36 bp, Artificial Sequence; identical to SEQ ID NO: 22443
  Probe

SEQ ID NO: 32860 - DNA, 15 bp, Artificial Sequence
  Probe
gtagagcatgggact

SEQ ID NO: 32861 - DNA, 16 bp, Artificial Sequence
  Probe
gtagagcatgggactc

SEQ ID NO: 32862 - DNA, 36 bp, Artificial Sequence; identical to SEQ ID NO: 22446
  Probe

SEQ ID NO: 32863 - DNA, 15 bp, Artificial Sequence
  Probe
gtagagcatttgact

SEQ ID NO: 32864 - DNA, 17 bp, Artificial Sequence
  Probe
gtagagcatttgactgc

SEQ ID NO: 32865 - DNA, 36 bp, Artificial Sequence
  Probe
gtagaggccttggtggtgcagtggtagaattctcgc

SEQ ID NO: 32866 - DNA, 38 bp, Artificial Sequence
  Probe
gtagaggccttggtggtgcagtggtagaattctcgcct

SEQ ID NO: 32867 - DNA, 44 bp, Artificial Sequence
  Probe
gtagaggccttggtggtgcagtggtagaattctcgcctcccacg

SEQ ID NO: 32868 - DNA, 24 bp, Artificial Sequence
  Probe
gtagaggttccatagtgtagtggt

SEQ ID NO: 32869 - DNA, 36 bp, Artificial Sequence; identical to SEQ ID NO: 22452
  Probe

SEQ ID NO: 32870 - DNA, 36 bp, Artificial Sequence
  Probe
gtagcattggtggttcagtggtagaattctcgcctg

SEQ ID NO: 32871 - DNA, 36 bp, Artificial Sequence
  Probe
gtagcggttatcacattcgcctcacacgcgaaaggt

SEQ ID NO: 32872 - DNA, 36 bp, Artificial Sequence
  Probe
gtaggacgaggtggccgagtggttaaggcgatggac

SEQ ID NO: 32873 - DNA, 18 bp, Artificial Sequence
  Probe
gtaggtagcgcatcagtc

SEQ ID NO: 32874 - DNA, 19 bp, Artificial Sequence
  Probe
gtaggtagcgcatcagtct

SEQ ID NO: 32875 - DNA, 18 bp, Artificial Sequence
  Probe
gtaggtagcgcgtcagtc

SEQ ID NO: 32876 - DNA, 19 bp, Artificial Sequence
  Probe
gtaggtagcgcgtcagtct

SEQ ID NO: 32877 - DNA, 36 bp, Artificial Sequence
  Probe
gtaggtggggatgtagctcagtggtagagcgcatgc

SEQ ID NO: 32878 - DNA, 18 bp, Artificial Sequence
  Probe
gtagtccgtgcgagaata

SEQ ID NO: 32879 - DNA, 15 bp, Artificial Sequence
  Probe
gtagtcgtggccgag

SEQ ID NO: 32880 - DNA, 17 bp, Artificial Sequence
  Probe
gtagtcgtggccgagtg

SEQ ID NO: 32881 - DNA, 20 bp, Artificial Sequence
  Probe
gtagtcgtggccgagtggtt

SEQ ID NO: 32882 - DNA, 22 bp, Artificial Sequence
  Probe
gtagtcgtggccgagtggttaa

SEQ ID NO: 32883 - DNA, 25 bp, Artificial Sequence
  Probe
gtagtcgtggccgagtggttaaggc

SEQ ID NO: 32884 - DNA, 32 bp, Artificial Sequence
  Probe
gtagtcgtggccgagtggttaaggcgatggac

SEQ ID NO: 32885 - DNA, 32 bp, Artificial Sequence
  Probe
gtagtcgtggccgagtggttaaggtgatggac

SEQ ID NO: 32886 - DNA, 26 bp, Artificial Sequence
  Probe
gtagtgtagtggttatcacgttcgcc

SEQ ID NO: 32887 - DNA, 36 bp, Artificial Sequence
  Probe
gtagttgaaatacaacgatggtttttcatatcattg

SEQ ID NO: 32888 - DNA, 21 bp, Artificial Sequence
  Probe
gtataaatagtaccgttaact

SEQ ID NO: 32889 - DNA, 36 bp, Artificial Sequence
  Probe
gtatagagcagagtggcgcagcggaagcgtgctggg

SEQ ID NO: 32890 - DNA, 36 bp, Artificial Sequence
  Probe
gtatagtggtgagcatagctgccttccaagcagttg

SEQ ID NO: 32891 - DNA, 21 bp, Artificial Sequence
  Probe
gtatagtggttagtactctgc

SEQ ID NO: 32892 - DNA, 22 bp, Artificial Sequence
  Probe
gtatagtggttagtactctgcg

SEQ ID NO: 32893 - DNA, 24 bp, Artificial Sequence
  Probe
gtatagtggttagtactctgcgtt

SEQ ID NO: 32894 - DNA, 34 bp, Artificial Sequence
  Probe
gtatatagtttaaacaaaacgaatgatttcgact

SEQ ID NO: 32895 - DNA, 36 bp, Artificial Sequence
  Probe
gtatatagtttaaacaaaacgaatgatttcgactca

SEQ ID NO: 32896 - DNA, 15 bp, Artificial Sequence
  Probe
gtatccccgcctgtc

SEQ ID NO: 32897 - DNA, 16 bp, Artificial Sequence
  Probe
gtatgaggccccgggt

SEQ ID NO: 32898 - DNA, 36 bp, Artificial Sequence
  Probe
gtatgaggccccgggttcaatccccggcatctccag

SEQ ID NO: 32899 - DNA, 16 bp, Artificial Sequence
  Probe
gtatgaggcctcgggt

SEQ ID NO: 32900 - DNA, 16 bp, Artificial Sequence
  Probe
gtatgaggtcccgggt

SEQ ID NO: 32901 - DNA, 15 bp, Artificial Sequence
  Probe
gtatgattctcgctt

SEQ ID NO: 32902 - DNA, 35 bp, Artificial Sequence; identical to SEQ ID NO: 22517
  Probe

SEQ ID NO: 32903 - DNA, 36 bp, Artificial Sequence; identical to SEQ ID NO: 22518
  Probe

SEQ ID NO: 32904 - DNA, 37 bp, Artificial Sequence; identical to SEQ ID NO: 22519
  Probe

SEQ ID NO: 32905 - DNA, 35 bp, Artificial Sequence; identical to SEQ ID NO: 14018
  Probe

SEQ ID NO: 32906 - DNA, 36 bp, Artificial Sequence; identical to SEQ ID NO: 14019
  Probe

SEQ ID NO: 32907 - DNA, 37 bp, Artificial Sequence; identical to SEQ ID NO: 6933
  Probe

SEQ ID NO: 32908 - DNA, 35 bp, Artificial Sequence
  Probe
gtatgattctcgcttcgggtgtgagaggtcccggg

SEQ ID NO: 32909 - DNA, 36 bp, Artificial Sequence
  Probe
gtatgattctcgcttcgggtgtgagaggtcccgggt

SEQ ID NO: 32910 - DNA, 18 bp, Artificial Sequence
  Probe
gtatgattctcgctttgg

SEQ ID NO: 32911 - DNA, 35 bp, Artificial Sequence; identical to SEQ ID NO: 14021
  Probe

SEQ ID NO: 32912 - DNA, 37 bp, Artificial Sequence; identical to SEQ ID NO: 14023
  Probe

SEQ ID NO: 32913 - DNA, 36 bp, Artificial Sequence; identical to SEQ ID NO: 22529
  Probe

SEQ ID NO: 32914 - DNA, 15 bp, Artificial Sequence
  Probe
gtattctctgtggct

SEQ ID NO: 32915 - DNA, 16 bp, Artificial Sequence
  Probe
gtattctctgtggctt

SEQ ID NO: 32916 - DNA, 17 bp, Artificial Sequence
  Probe
gtattctctgtggcttt

SEQ ID NO: 32917 - DNA, 18 bp, Artificial Sequence
  Probe
gtattctctgtggctttt

SEQ ID NO: 32918 - DNA, 19 bp, Artificial Sequence
  Probe
gtattctctgtggctttta

SEQ ID NO: 32919 - DNA, 23 bp, Artificial Sequence
  Probe
gtcaattcctcgttagtatagtg

SEQ ID NO: 32920 - DNA, 36 bp, Artificial Sequence
  Probe
gtcaattcctcgttagtatagtggtgagtatccccg

SEQ ID NO: 32921 - DNA, 36 bp, Artificial Sequence; identical to SEQ ID NO: 14034
  Probe

SEQ ID NO: 32922 - DNA, 23 bp, Artificial Sequence
  Probe
gtcagctaaataagctatcgggc

SEQ ID NO: 32923 - DNA, 24 bp, Artificial Sequence
  Probe
gtcagctaaataagctatcgggcc

SEQ ID NO: 32924 - DNA, 25 bp, Artificial Sequence
  Probe
gtcagctaaataagctatcgggccc

SEQ ID NO: 32925 - DNA, 26 bp, Artificial Sequence
  Probe
gtcagctaaataagctatcgggccca

SEQ ID NO: 32926 - DNA, 27 bp, Artificial Sequence
  Probe
gtcagctaaataagctatcgggcccat

SEQ ID NO: 32927 - DNA, 15 bp, Artificial Sequence
  Probe
gtcaggatggccgag

SEQ ID NO: 32928 - DNA, 16 bp, Artificial Sequence
  Probe
gtcaggatggccgagc

SEQ ID NO: 32929 - DNA, 17 bp, Artificial Sequence
  Probe
gtcaggatggccgagcg

SEQ ID NO: 32930 - DNA, 18 bp, Artificial Sequence
  Probe
gtcaggatggccgagcgg

SEQ ID NO: 32931 - DNA, 19 bp, Artificial Sequence
  Probe
gtcaggatggccgagcggt

SEQ ID NO: 32932 - DNA, 20 bp, Artificial Sequence
  Probe
gtcaggatggccgagcggtc

SEQ ID NO: 32933 - DNA, 21 bp, Artificial Sequence
  Probe
gtcaggatggccgagcggtct

SEQ ID NO: 32934 - DNA, 22 bp, Artificial Sequence
  Probe
gtcaggatggccgagcggtcta

SEQ ID NO: 32935 - DNA, 23 bp, Artificial Sequence
  Probe
gtcaggatggccgagcggtctaa

SEQ ID NO: 32936 - DNA, 24 bp, Artificial Sequence
  Probe
gtcaggatggccgagcggtctaag

SEQ ID NO: 32937 - DNA, 25 bp, Artificial Sequence
  Probe
gtcaggatggccgagcggtctaagg

SEQ ID NO: 32938 - DNA, 26 bp, Artificial Sequence
  Probe
gtcaggatggccgagcggtctaaggc

SEQ ID NO: 32939 - DNA, 31 bp, Artificial Sequence; identical to SEQ ID NO: 6989
  Probe

SEQ ID NO: 32940 - DNA, 35 bp, Artificial Sequence; identical to SEQ ID NO: 1480
  Probe

SEQ ID NO: 32941 - DNA, 36 bp, Artificial Sequence; identical to SEQ ID NO: 22592
  Probe

SEQ ID NO: 32942 - DNA, 16 bp, Artificial Sequence
  Probe
gtcaggatggccgagt

SEQ ID NO: 32943 - DNA, 17 bp, Artificial Sequence
  Probe
gtcaggatggccgagtg

SEQ ID NO: 32944 - DNA, 21 bp, Artificial Sequence
  Probe
gtcaggatggccgagtggtct

SEQ ID NO: 32945 - DNA, 22 bp, Artificial Sequence
  Probe
gtcaggatggccgagtggtcta

SEQ ID NO: 32946 - DNA, 32 bp, Artificial Sequence; identical to SEQ ID NO: 14044
  Probe

SEQ ID NO: 32947 - DNA, 33 bp, Artificial Sequence
  Probe
gtcaggatggccgagtggtctaaggcgccagac

SEQ ID NO: 32948 - DNA, 36 bp, Artificial Sequence; identical to SEQ ID NO: 22604
  Probe

SEQ ID NO: 32949 - DNA, 24 bp, Artificial Sequence
  Probe
gtcagggcttctgtagtgtagtgg

SEQ ID NO: 32950 - DNA, 36 bp, Artificial Sequence
  Probe
gtcagggcttctgtagtgtagtggttatcacgttcg

SEQ ID NO: 32951 - DNA, 39 bp, Artificial Sequence
  Probe
gtcagggcttctgtagtgtagtggttatcacgttcgcct

SEQ ID NO: 32952 - DNA, 36 bp, Artificial Sequence
  Probe
gtcagggggtgtagctcagtggtagagcgcgtgctt

SEQ ID NO: 32953 - DNA, 15 bp, Artificial Sequence
  Probe
gtcagtgcttctttt

SEQ ID NO: 32954 - DNA, 30 bp, Artificial Sequence; identical to SEQ ID NO: 22605
  Probe

SEQ ID NO: 32955 - DNA, 36 bp, Artificial Sequence
  Probe
gtcatctcccacatggtctagcggttaggattcctg

SEQ ID NO: 32956 - DNA, 39 bp, Artificial Sequence
  Probe
gtcatctcccacatggtctagcggttaggattcctggtt

SEQ ID NO: 32957 - DNA, 40 bp, Artificial Sequence; identical to SEQ ID NO: 22607
  Probe

SEQ ID NO: 32958 - DNA, 41 bp, Artificial Sequence
  Probe
gtcatctcccacatggtctagcggttaggattcctggtttt

SEQ ID NO: 32959 - DNA, 36 bp, Artificial Sequence
  Probe
gtccagggttcaagtccctgttcgggcgtttgtagt

SEQ ID NO: 32960 - DNA, 16 bp, Artificial Sequence
  Probe
gtcccaccagagtcgc

SEQ ID NO: 32961 - DNA, 17 bp, Artificial Sequence
  Probe
gtcccaccagagtcgct

SEQ ID NO: 32962 - DNA, 15 bp, Artificial Sequence
  Probe
gtcccggcggagtcg

SEQ ID NO: 32963 - DNA, 33 bp, Artificial Sequence; identical to SEQ ID NO: 22621
  Probe

SEQ ID NO: 32964 - DNA, 34 bp, Artificial Sequence; identical to SEQ ID NO: 22622
  Probe

SEQ ID NO: 32965 - DNA, 35 bp, Artificial Sequence; identical to SEQ ID NO: 22623
  Probe

SEQ ID NO: 32966 - DNA, 36 bp, Artificial Sequence; identical to SEQ ID NO: 22624
  Probe

SEQ ID NO: 32967 - DNA, 36 bp, Artificial Sequence
  Probe
gtccctagtagctcgccgtgatcgtatagtggttag

SEQ ID NO: 32968 - DNA, 36 bp, Artificial Sequence; identical to SEQ ID NO: 22631
  Probe

SEQ ID NO: 32969 - DNA, 15 bp, Artificial Sequence
  Probe
gtccctgggctgtca

SEQ ID NO: 32970 - DNA, 34 bp, Artificial Sequence
  Probe
gtccctggtggtctagtggctaggattcggcgct

SEQ ID NO: 32971 - DNA, 18 bp, Artificial Sequence
  Probe
gtccctgtccaggcgcta

SEQ ID NO: 32972 - DNA, 15 bp, Artificial Sequence
  Probe
gtccctgttcgggcg

SEQ ID NO: 32973 - DNA, 18 bp, Artificial Sequence
  Probe
gtccctgttcgggcgtct

SEQ ID NO: 32974 - DNA, 36 bp, Artificial Sequence
  Probe
gtcccttcgatagctcagctggtagagcggaggact

SEQ ID NO: 32975 - DNA, 20 bp, Artificial Sequence
  Probe
gtcctagcctttctattagc

SEQ ID NO: 32976 - DNA, 17 bp, Artificial Sequence
  Probe
gtcctggctcgttggtc

SEQ ID NO: 32977 - DNA, 19 bp, Artificial Sequence
  Probe
gtcctggctcgttggtcta

SEQ ID NO: 32978 - DNA, 35 bp, Artificial Sequence
  Probe
gtcctggctcgttggtctaggggtatgattctcgc

SEQ ID NO: 32979 - DNA, 36 bp, Artificial Sequence; identical to SEQ ID NO: 22646
  Probe

SEQ ID NO: 32980 - DNA, 38 bp, Artificial Sequence; identical to SEQ ID NO: 22647
  Probe

SEQ ID NO: 32981 - DNA, 21 bp, Artificial Sequence
  Probe
gtcctgtgtccctagtagctc

SEQ ID NO: 32982 - DNA, 27 bp, Artificial Sequence
  Probe
gtccttggaaaaaggttttcatctccg

SEQ ID NO: 32983 - DNA, 17 bp, Artificial Sequence
  Probe
gtccttgtagtataaac

SEQ ID NO: 32984 - DNA, 18 bp, Artificial Sequence
  Probe
gtccttgtagtataaact

SEQ ID NO: 32985 - DNA, 19 bp, Artificial Sequence
  Probe
gtccttgtagtataaacta

SEQ ID NO: 32986 - DNA, 26 bp, Artificial Sequence
  Probe
gtccttgtagtataaactaatacacc

SEQ ID NO: 32987 - DNA, 27 bp, Artificial Sequence
  Probe
gtccttgtagtataaactaatacacca

SEQ ID NO: 32988 - DNA, 28 bp, Artificial Sequence
  Probe
gtccttgtagtataaactaatacaccag

SEQ ID NO: 32989 - DNA, 36 bp, Artificial Sequence
  Probe
gtccttgtagtataaactaatacaccagtcttgtaa

SEQ ID NO: 32990 - DNA, 36 bp, Artificial Sequence
  Probe
gtcgagacagcagagtggcgcagcggaagcgtgctg

SEQ ID NO: 32991 - DNA, 36 bp, Artificial Sequence
  Probe
gtcgcccggctagctcagtcggtagagcatgagact

SEQ ID NO: 32992 - DNA, 36 bp, Artificial Sequence
  Probe
gtcgccctcttagcgcagcgggcagcgcgtcagtct

SEQ ID NO: 32993 - DNA, 36 bp, Artificial Sequence
  Probe
gtcgccgtcgtcctcgttagtatagtggtgagtatc

SEQ ID NO: 32994 - DNA, 40 bp, Artificial Sequence
  Probe
gtcgccgtcgtcctcgttagtatagtggtgagtatccccg

SEQ ID NO: 32995 - DNA, 36 bp, Artificial Sequence
  Probe
gtcgcgagttcaaatctcgctggggcctcggctgta

SEQ ID NO: 32996 - DNA, 27 bp, Artificial Sequence
  Probe
gtcgcgggttcgatccccgtacgggcc

SEQ ID NO: 32997 - DNA, 36 bp, Artificial Sequence
  Probe
gtcgcgggttcgatccccgtacgggccaggattgaa

SEQ ID NO: 32998 - DNA, 39 bp, Artificial Sequence
  Probe
gtcgcgggttcgatccccgtacgggccaggattgaaact

SEQ ID NO: 32999 - DNA, 30 bp, Artificial Sequence
  Probe
gtcgctggttcgattccggctcgaaggact

SEQ ID NO: 33000 - DNA, 36 bp, Artificial Sequence
  Probe
gtcgctggttcgattccggctcgaaggacttcgtct

SEQ ID NO: 33001 - DNA, 19 bp, Artificial Sequence
  Probe
gtcggctagagcgtggtgc

SEQ ID NO: 33002 - DNA, 28 bp, Artificial Sequence
  Probe
gtcggctcgttggtctaggggtatgatt

SEQ ID NO: 33003 - DNA, 36 bp, Artificial Sequence
  Probe
gtcggctcgttggtctaggggtatgattctcgctta

SEQ ID NO: 33004 - DNA, 36 bp, Artificial Sequence
  Probe
gtcggctcgttggtctaggggtatgattctcgcttc

SEQ ID NO: 33005 - DNA, 16 bp, Artificial Sequence
  Probe
gtcggtagagcatcag

SEQ ID NO: 33006 - DNA, 19 bp, Artificial Sequence
  Probe
gtcggtagagcatcagact

SEQ ID NO: 33007 - DNA, 21 bp, Artificial Sequence
  Probe
gtcggtagagcatcagacttt

SEQ ID NO: 33008 - DNA, 22 bp, Artificial Sequence
  Probe
gtcggtagagcatcagactttt

SEQ ID NO: 33009 - DNA, 16 bp, Artificial Sequence
  Probe
gtcggtagagcatgag

SEQ ID NO: 33010 - DNA, 17 bp, Artificial Sequence
  Probe
gtcggtagagcatgaga

SEQ ID NO: 33011 - DNA, 18 bp, Artificial Sequence
  Probe
gtcggtagagcatgagac

SEQ ID NO: 33012 - DNA, 19 bp, Artificial Sequence
  Probe
gtcggtagagcatgagacc

SEQ ID NO: 33013 - DNA, 20 bp, Artificial Sequence
  Probe
gtcggtagagcatgagaccc

SEQ ID NO: 33014 - DNA, 19 bp, Artificial Sequence
  Probe
gtcggtagagcatgagact

SEQ ID NO: 33015 - DNA, 20 bp, Artificial Sequence
  Probe
gtcggtagagcatgagactc

SEQ ID NO: 33016 - DNA, 26 bp, Artificial Sequence
  Probe
gtcggtagagcatgagactcttaatc

SEQ ID NO: 33017 - DNA, 27 bp, Artificial Sequence
  Probe
gtcggtagagcatgagactcttaatct

SEQ ID NO: 33018 - DNA, 16 bp, Artificial Sequence
  Probe
gtcggtagagcatggg

SEQ ID NO: 33019 - DNA, 27 bp, Artificial Sequence
  Probe
gtcggtagagcatgggactcttaatcc

SEQ ID NO: 33020 - DNA, 18 bp, Artificial Sequence
  Probe
gtcgtcctcgttagtata

SEQ ID NO: 33021 - DNA, 21 bp, Artificial Sequence
  Probe
gtcgtcctcgttagtatagtg

SEQ ID NO: 33022 - DNA, 30 bp, Artificial Sequence; identical to SEQ ID NO: 22679
  Probe

SEQ ID NO: 33023 - DNA, 31 bp, Artificial Sequence
  Probe
gtcgtcctcgttagtatagtggtgagtatcc

SEQ ID NO: 33024 - DNA, 36 bp, Artificial Sequence
  Probe
gtcgtcctcgttagtatagtggtgagtatccccgcc

SEQ ID NO: 33025 - DNA, 37 bp, Artificial Sequence
  Probe
gtcgtcctcgttagtatagtggtgagtatccccgcct

SEQ ID NO: 33026 - DNA, 38 bp, Artificial Sequence
  Probe
gtcgtcctcgttagtatagtggtgagtatccccgcctg

SEQ ID NO: 33027 - DNA, 21 bp, Artificial Sequence
  Probe
gtcgtggcgtcccggtagctc

SEQ ID NO: 33028 - DNA, 27 bp, Artificial Sequence
  Probe
gtcgtgggttcgagccccacgttgggc

SEQ ID NO: 33029 - DNA, 28 bp, Artificial Sequence
  Probe
gtcgtgggttcgagccccacgttgggcg

SEQ ID NO: 33030 - DNA, 29 bp, Artificial Sequence
  Probe
gtcgtgggttcgagccccacgttgggcga

SEQ ID NO: 33031 - DNA, 29 bp, Artificial Sequence
  Probe
gtcgtgggttcgagccccacgttgggcgc

SEQ ID NO: 33032 - DNA, 36 bp, Artificial Sequence
  Probe
gtcgtgggttcgagccccacgttgggcgcgggttgt

SEQ ID NO: 33033 - DNA, 31 bp, Artificial Sequence
  Probe
gtcgtgggttcgagccccacgttgggcgctg

SEQ ID NO: 33034 - DNA, 22 bp, Artificial Sequence
  Probe
gtcgtggttgtagtccgtgcga

SEQ ID NO: 33035 - DNA, 23 bp, Artificial Sequence
  Probe
gtcgtggttgtagtccgtgcgag

SEQ ID NO: 33036 - DNA, 26 bp, Artificial Sequence
  Probe
gtcgtggttgtagtccgtgcgagaat

SEQ ID NO: 33037 - DNA, 27 bp, Artificial Sequence
  Probe
gtcgtggttgtagtccgtgcgagaata

SEQ ID NO: 33038 - DNA, 24 bp, Artificial Sequence
  Probe
gtctaacaacatggctttctcaac

SEQ ID NO: 33039 - DNA, 36 bp, Artificial Sequence
  Probe
gtctacgggagcccggatagctcagtcggtagagca

SEQ ID NO: 33040 - DNA, 21 bp, Artificial Sequence
  Probe
gtctaggggtatgattctcgc

SEQ ID NO: 33041 - DNA, 22 bp, Artificial Sequence
  Probe
gtctaggggtatgattctcgct

SEQ ID NO: 33042 - DNA, 22 bp, Artificial Sequence
  Probe
gtctaggggtatgattctcggt

SEQ ID NO: 33043 - DNA, 17 bp, Artificial Sequence
  Probe
gtctagtggttaggatt

SEQ ID NO: 33044 - DNA, 36 bp, Artificial Sequence
  Probe
gtctagtggttaggattcggcgctctcaccgccgcg

SEQ ID NO: 33045 - DNA, 25 bp, Artificial Sequence
  Probe
gtctcgtaaaccgaagatcgcgggt

SEQ ID NO: 33046 - DNA, 36 bp, Artificial Sequence
  Probe
gtctctgtggcgcaatcggttagcgcgttcggctgt

SEQ ID NO: 33047 - DNA, 33 bp, Artificial Sequence
  Probe
gtctgcaccaggatggccgagtggttaaggcgt

SEQ ID NO: 33048 - DNA, 36 bp, Artificial Sequence
  Probe
gtctgcagacgaggtggccgagtggttaaggcgatg

SEQ ID NO: 33049 - DNA, 36 bp, Artificial Sequence
  Probe
gtctgcctccttagcgcagtaggcagcgcgtcagtc

SEQ ID NO: 33050 - DNA, 31 bp, Artificial Sequence
  Probe
gtctggctctgtggcgcaatggatagcgcat

SEQ ID NO: 33051 - DNA, 36 bp, Artificial Sequence
  Probe
gtctggctctgtggcgcaatggatagcgcattggac

SEQ ID NO: 33052 - DNA, 36 bp, Artificial Sequence
  Probe
gtcttccctggtggtctagtggttaggattcggcgc

SEQ ID NO: 33053 - DNA, 25 bp, Artificial Sequence
  Probe
gtcttgtaaaccggagatgaaaacc

SEQ ID NO: 33054 - DNA, 26 bp, Artificial Sequence
  Probe
gtcttgtaaaccggagatgaaaacct

SEQ ID NO: 33055 - DNA, 36 bp, Artificial Sequence
  Probe
gtcttgtaaaccggagatgaaaacctttttccaagg

SEQ ID NO: 33056 - DNA, 17 bp, Artificial Sequence
  Probe
gtctttaactccaccat

SEQ ID NO: 33057 - DNA, 36 bp, Artificial Sequence
  Probe
gtgaagagcccggatagctcagtcggtagagcatca

SEQ ID NO: 33058 - DNA, 40 bp, Artificial Sequence
  Probe
gtgaagagcccggatagctcagtcggtagagcatcagact

SEQ ID NO: 33059 - DNA, 42 bp, Artificial Sequence
  Probe
gtgaagagcccggatagctcagtcggtagagcatcagacttt

SEQ ID NO: 33060 - DNA, 15 bp, Artificial Sequence
  Probe
gtgaagcattggact

SEQ ID NO: 33061 - DNA, 17 bp, Artificial Sequence
  Probe
gtgaagcattggactgt

SEQ ID NO: 33062 - DNA, 18 bp, Artificial Sequence
  Probe
gtgaagcattggactgta

SEQ ID NO: 33063 - DNA, 19 bp, Artificial Sequence
  Probe
gtgaagcattggactgtaa

SEQ ID NO: 33064 - DNA, 20 bp, Artificial Sequence
  Probe
gtgaagcattggactgtaaa

SEQ ID NO: 33065 - DNA, 21 bp, Artificial Sequence
  Probe
gtgaagcattggactgtaaat

SEQ ID NO: 33066 - DNA, 22 bp, Artificial Sequence
  Probe
gtgaagcattggactgtaaatc

SEQ ID NO: 33067 - DNA, 23 bp, Artificial Sequence
  Probe
gtgaagcattggactgtaaatct

SEQ ID NO: 33068 - DNA, 36 bp, Artificial Sequence
  Probe
gtgaagcattggactgtaaatctaaagacaggggtt

SEQ ID NO: 33069 - DNA, 36 bp, Artificial Sequence
  Probe
gtgaatccttcgatagctcagttggtagagcggagg

SEQ ID NO: 33070 - DNA, 50 bp, Artificial Sequence
  Probe
gtgaatccttcgatagctcagttggtagagcggaggactgtagttggctg

SEQ ID NO: 33071 - DNA, 29 bp, Artificial Sequence
  Probe
gtgaatctgacaacagaggcttacgaccc

SEQ ID NO: 33072 - DNA, 30 bp, Artificial Sequence; identical to SEQ ID NO: 7044
  Probe

SEQ ID NO: 33073 - DNA, 32 bp, Artificial Sequence; identical to SEQ ID NO: 7045
  Probe

SEQ ID NO: 33074 - DNA, 31 bp, Artificial Sequence
  Probe
gtgacctcgtggcgcaatggtagcgcgtctg

SEQ ID NO: 33075 - DNA, 36 bp, Artificial Sequence; identical to SEQ ID NO: 22713
  Probe

SEQ ID NO: 33076 - DNA, 15 bp, Artificial Sequence
  Probe
gtgacgaatagagca

SEQ ID NO: 33077 - DNA, 36 bp, Artificial Sequence
  Probe
gtgacgaggtggccgagtggttaaggcgatggactg

SEQ ID NO: 33078 - DNA, 36 bp, Artificial Sequence
  Probe
gtgagcactctggactctgaatccagcgatccgagt

SEQ ID NO: 33079 - DNA, 36 bp, Artificial Sequence
  Probe
gtgagcccggagagctcagtgggtagagcatcagac

SEQ ID NO: 33080 - DNA, 17 bp, Artificial Sequence
  Probe
gtgagcccggatagctc

SEQ ID NO: 33081 - DNA, 23 bp, Artificial Sequence
  Probe
gtgagcccggatagctcagtcgg

SEQ ID NO: 33082 - DNA, 24 bp, Artificial Sequence
  Probe
gtgagcccggatagctcagtcggt

SEQ ID NO: 33083 - DNA, 25 bp, Artificial Sequence
  Probe
gtgagcccggatagctcagtcggta

SEQ ID NO: 33084 - DNA, 26 bp, Artificial Sequence
  Probe
gtgagcccggatagctcagtcggtag

SEQ ID NO: 33085 - DNA, 27 bp, Artificial Sequence
  Probe
gtgagcccggatagctcagtcggtaga

SEQ ID NO: 33086 - DNA, 28 bp, Artificial Sequence
  Probe
gtgagcccggatagctcagtcggtagag

SEQ ID NO: 33087 - DNA, 29 bp, Artificial Sequence
  Probe
gtgagcccggatagctcagtcggtagagc

SEQ ID NO: 33088 - DNA, 30 bp, Artificial Sequence; identical to SEQ ID NO: 22721
  Probe

SEQ ID NO: 33089 - DNA, 31 bp, Artificial Sequence
  Probe
gtgagcccggatagctcagtcggtagagcat

SEQ ID NO: 33090 - DNA, 32 bp, Artificial Sequence
  Probe
gtgagcccggatagctcagtcggtagagcatc

SEQ ID NO: 33091 - DNA, 33 bp, Artificial Sequence; identical to SEQ ID NO: 22722
  Probe

SEQ ID NO: 33092 - DNA, 34 bp, Artificial Sequence
  Probe
gtgagcccggatagctcagtcggtagagcatcag

SEQ ID NO: 33093 - DNA, 35 bp, Artificial Sequence; identical to SEQ ID NO: 22723
  Probe

SEQ ID NO: 33094 - DNA, 36 bp, Artificial Sequence; identical to SEQ ID NO: 22724
  Probe

SEQ ID NO: 33095 - DNA, 37 bp, Artificial Sequence; identical to SEQ ID NO: 22725
  Probe

SEQ ID NO: 33096 - DNA, 38 bp, Artificial Sequence; identical to SEQ ID NO: 22726
  Probe

SEQ ID NO: 33097 - DNA, 39 bp, Artificial Sequence; identical to SEQ ID NO: 22727
  Probe

SEQ ID NO: 33098 - DNA, 40 bp, Artificial Sequence; identical to SEQ ID NO: 22728
  Probe

SEQ ID NO: 33099 - DNA, 41 bp, Artificial Sequence; identical to SEQ ID NO: 22729
  Probe

SEQ ID NO: 33100 - DNA, 42 bp, Artificial Sequence; identical to SEQ ID NO: 22730
  Probe

SEQ ID NO: 33101 - DNA, 43 bp, Artificial Sequence; identical to SEQ ID NO: 22731
  Probe

SEQ ID NO: 33102 - DNA, 44 bp, Artificial Sequence
  Probe
gtgagcccggatagctcagtcggtagagcatcagacttttaatc

SEQ ID NO: 33103 - DNA, 29 bp, Artificial Sequence
  Probe
gtgagcccggctagctcagtcggtagagc

SEQ ID NO: 33104 - DNA, 30 bp, Artificial Sequence; identical to SEQ ID NO: 22733
  Probe

SEQ ID NO: 33105 - DNA, 36 bp, Artificial Sequence
  Probe
gtgagcccggctagctcagtcggtagagcatgagac

SEQ ID NO: 33106 - DNA, 28 bp, Artificial Sequence
  Probe
gtgaggacaatggcacggcaaggggagt

SEQ ID NO: 33107 - DNA, 36 bp, Artificial Sequence; identical to SEQ ID NO: 22735
  Probe

SEQ ID NO: 33108 - DNA, 15 bp, Artificial Sequence
  Probe
gtgagtatccccgcc

SEQ ID NO: 33109 - DNA, 18 bp, Artificial Sequence
  Probe
gtgagtatccccgcctgt

SEQ ID NO: 33110 - DNA, 21 bp, Artificial Sequence
  Probe
gtgagtatccccgcctgtcac

SEQ ID NO: 33111 - DNA, 36 bp, Artificial Sequence; identical to SEQ ID NO: 22741
  Probe

SEQ ID NO: 33112 - DNA, 27 bp, Artificial Sequence
  Probe
gtgatcgtatagtggttagtactctgc

SEQ ID NO: 33113 - DNA, 28 bp, Artificial Sequence
  Probe
gtgatcgtatagtggttagtactctgcg

SEQ ID NO: 33114 - DNA, 30 bp, Artificial Sequence; identical to SEQ ID NO: 1505
  Probe

SEQ ID NO: 33115 - DNA, 29 bp, Artificial Sequence
  Probe
gtgatggtttccctctggcagttctcaag

SEQ ID NO: 33116 - DNA, 36 bp, Artificial Sequence
  Probe
gtgcacccttcgatagctcagctggtagagcggagg

SEQ ID NO: 33117 - DNA, 42 bp, Artificial Sequence
  Probe
gtgcacccttcgatagctcagctggtagagcggaggactgta

SEQ ID NO: 33118 - DNA, 44 bp, Artificial Sequence
  Probe
gtgcacccttcgatagctcagctggtagagcggaggactgtaga

SEQ ID NO: 33119 - DNA, 16 bp, Artificial Sequence
  Probe
gtgcacttggacgaac

SEQ ID NO: 33120 - DNA, 17 bp, Artificial Sequence
  Probe
gtgcacttggacgaacc

SEQ ID NO: 33121 - DNA, 33 bp, Artificial Sequence
  Probe
gtgcaggtagcgtggccgagcggtctaaggcgc

SEQ ID NO: 33122 - DNA, 34 bp, Artificial Sequence
  Probe
gtgcatgggtggttcagtggtagaattctcgcct

SEQ ID NO: 33123 - DNA, 36 bp, Artificial Sequence
  Probe
gtgccaggatagttcaggtggtagagcatcagactt

SEQ ID NO: 33124 - DNA, 19 bp, Artificial Sequence
  Probe
gtgccaggggatgtagctc

SEQ ID NO: 33125 - DNA, 36 bp, Artificial Sequence
  Probe
gtgcccgctcccttcgatagctcagctggtagagcg

SEQ ID NO: 33126 - DNA, 36 bp, Artificial Sequence
  Probe
gtgcccggctagctcagtcggtagagcatgagactc

SEQ ID NO: 33127 - DNA, 36 bp, Artificial Sequence
  Probe
gtgccgaaatagctcagttgggagagcgttagactg

SEQ ID NO: 33128 - DNA, 36 bp, Artificial Sequence
  Probe
gtgcgcccttcgatagctcagctggtagagcggagg

SEQ ID NO: 33129 - DNA, 42 bp, Artificial Sequence
  Probe
gtgcgcccttcgatagctcagctggtagagcggaggactgta

SEQ ID NO: 33130 - DNA, 46 bp, Artificial Sequence
  Probe
gtgcgcccttcgatagctcagctggtagagcggaggactgtagcct

SEQ ID NO: 33131 - DNA, 50 bp, Artificial Sequence
  Probe
gtgcgcccttcgatagctcagctggtagagcggaggactgtagcctgtag

SEQ ID NO: 33132 - DNA, 36 bp, Artificial Sequence
  Probe
gtgcggcgttggtggtatagtggtgagcatagctgc

SEQ ID NO: 33133 - DNA, 33 bp, Artificial Sequence; identical to SEQ ID NO: 22765
  Probe

SEQ ID NO: 33134 - DNA, 36 bp, Artificial Sequence; identical to SEQ ID NO: 22768
  Probe

SEQ ID NO: 33135 - DNA, 26 bp, Artificial Sequence
  Probe
gtgctaataacgccaaggtcgcgggt

SEQ ID NO: 33136 - DNA, 35 bp, Artificial Sequence
  Probe
gtgctaatggtggagttaaagactttttctctgat

SEQ ID NO: 33137 - DNA, 36 bp, Artificial Sequence
  Probe
gtgctaatggtggagttaaagactttttctctgatt

SEQ ID NO: 33138 - DNA, 36 bp, Artificial Sequence
  Probe
gtgcttccttcgatagctcagctggtagagcggagg

SEQ ID NO: 33139 - DNA, 47 bp, Artificial Sequence
  Probe
gtgcttccttcgatagctcagctggtagagcggaggactgtagtact

SEQ ID NO: 33140 - DNA, 36 bp, Artificial Sequence
  Probe
gtgctttgcacgcgtgggttcgaatcccatcctcgt

SEQ ID NO: 33141 - DNA, 34 bp, Artificial Sequence
  Probe
gtggcacggagaattttggattctcagggatggg

SEQ ID NO: 33142 - DNA, 36 bp, Artificial Sequence
  Probe
gtggcagcgatggccgagtggttaaggcgttggact

SEQ ID NO: 33143 - DNA, 32 bp, Artificial Sequence
  Probe
gtggccctgtagctcagcggttggagcgctgg

SEQ ID NO: 33144 - DNA, 33 bp, Artificial Sequence
  Probe
gtggccctgtagctcagcggttggagcgctggt

SEQ ID NO: 33145 - DNA, 36 bp, Artificial Sequence
  Probe
gtggccctgtagctcagcggttggagcgctggtctc

SEQ ID NO: 33146 - DNA, 36 bp, Artificial Sequence
  Probe
gtggccgagatagctcagttgggagagcgttagact

SEQ ID NO: 33147 - DNA, 15 bp, Artificial Sequence
  Probe
gtggcctgtgacttt

SEQ ID NO: 33148 - DNA, 36 bp, Artificial Sequence
  Probe
gtggcggctccatagctcaggggttagagcactggt

SEQ ID NO: 33149 - DNA, 36 bp, Artificial Sequence
  Probe
gtggcgggggtatagctcagtggtagagcatttgac

SEQ ID NO: 33150 - DNA, 32 bp, Artificial Sequence
  Probe
gtggcggttccatggtgtaatggttagcactc

SEQ ID NO: 33151 - DNA, 15 bp, Artificial Sequence
  Probe
gtggcgtcccggtag

SEQ ID NO: 33152 - DNA, 16 bp, Artificial Sequence
  Probe
gtggcgtcccggtagc

SEQ ID NO: 33153 - DNA, 17 bp, Artificial Sequence
  Probe
gtggcgtcccggtagct

SEQ ID NO: 33154 - DNA, 18 bp, Artificial Sequence
  Probe
gtggcgtcccggtagctc

SEQ ID NO: 33155 - DNA, 30 bp, Artificial Sequence
  Probe
gtggcgtcccggtagctcgccgtgatcgta

SEQ ID NO: 33156 - DNA, 33 bp, Artificial Sequence
  Probe
gtggcgtcccggtagctcgccgtgatcgtatag

SEQ ID NO: 33157 - DNA, 50 bp, Artificial Sequence
  Probe
gtggcgtcccggtagctcgccgtgatcgtatagtggttagtactctgcgt

SEQ ID NO: 33158 - DNA, 16 bp, Artificial Sequence
  Probe
gtggctaggattcggc

SEQ ID NO: 33159 - DNA, 17 bp, Artificial Sequence
  Probe
gtggctaggattcggcg

SEQ ID NO: 33160 - DNA, 36 bp, Artificial Sequence
  Probe
gtgggcagagtggtgcagcggaagcgtgctgggccc

SEQ ID NO: 33161 - DNA, 30 bp, Artificial Sequence; identical to SEQ ID NO: 22800
  Probe

SEQ ID NO: 33162 - DNA, 36 bp, Artificial Sequence
  Probe
gtggggtttccgtagtgtagtggttatcacgttcgc

SEQ ID NO: 33163 - DNA, 15 bp, Artificial Sequence
  Probe
gtgggtggctttttt

SEQ ID NO: 33164 - DNA, 16 bp, Artificial Sequence
  Probe
gtgggtggcttttttt

SEQ ID NO: 33165 - DNA, 27 bp, Artificial Sequence
  Probe
gtgggttcgaatcccatcctcgtcgct

SEQ ID NO: 33166 - DNA, 27 bp, Artificial Sequence
  Probe
gtgggttcgaatcccatcctcgtcggc

SEQ ID NO: 33167 - DNA, 26 bp, Artificial Sequence
  Probe
gtgggtttaagtcccattggtctagt

SEQ ID NO: 33168 - DNA, 36 bp, Artificial Sequence
  Probe
gtgggtttccgtagtgtagtggtcatcacgttcgcc

SEQ ID NO: 33169 - DNA, 16 bp, Artificial Sequence
  Probe
gtggtagaattctcgc

SEQ ID NO: 33170 - DNA, 17 bp, Artificial Sequence
  Probe
gtggtagaattctcgcc

SEQ ID NO: 33171 - DNA, 18 bp, Artificial Sequence
  Probe
gtggtagaattctcgcct

SEQ ID NO: 33172 - DNA, 20 bp, Artificial Sequence
  Probe
gtggtagaattctcgcctgc

SEQ ID NO: 33173 - DNA, 21 bp, Artificial Sequence
  Probe
gtggtagaattctcgcctgcc

SEQ ID NO: 33174 - DNA, 22 bp, Artificial Sequence
  Probe
gtggtagaattctcgcctgcca

SEQ ID NO: 33175 - DNA, 23 bp, Artificial Sequence
  Probe
gtggtagaattctcgcctgccac

SEQ ID NO: 33176 - DNA, 29 bp, Artificial Sequence
  Probe
gtggtagaattctcgcctgccacgcggga

SEQ ID NO: 33177 - DNA, 36 bp, Artificial Sequence
  Probe
gtggtagaattctcgcctgccacgcgggaggcccgg

SEQ ID NO: 33178 - DNA, 18 bp, Artificial Sequence
  Probe
gtggtagagcatttgact

SEQ ID NO: 33179 - DNA, 20 bp, Artificial Sequence
  Probe
gtggtagagcatttgactgc

SEQ ID NO: 33180 - DNA, 16 bp, Artificial Sequence
  Probe
gtggtagagcgcgtgc

SEQ ID NO: 33181 - DNA, 21 bp, Artificial Sequence
  Probe
gtggtagagcgcgtgcttagc

SEQ ID NO: 33182 - DNA, 21 bp, Artificial Sequence
  Probe
gtggtagagcgcgtgcttcgc

SEQ ID NO: 33183 - DNA, 16 bp, Artificial Sequence
  Probe
gtggtatgattctcgc

SEQ ID NO: 33184 - DNA, 18 bp, Artificial Sequence
  Probe
gtggtcatcacgttcgcc

SEQ ID NO: 33185 - DNA, 25 bp, Artificial Sequence
  Probe
gtggtcatcacgttcgcctaacacg

SEQ ID NO: 33186 - DNA, 27 bp, Artificial Sequence
  Probe
gtggtctagtggttaggattcggcgct

SEQ ID NO: 33187 - DNA, 19 bp, Artificial Sequence
  Probe
gtggtgacttttgccctcc

SEQ ID NO: 33188 - DNA, 36 bp, Artificial Sequence; identical to SEQ ID NO: 14097
  Probe

SEQ ID NO: 33189 - DNA, 16 bp, Artificial Sequence
  Probe
gtggttaggattcggc

SEQ ID NO: 33190 - DNA, 17 bp, Artificial Sequence
  Probe
gtggttaggattcggcg

SEQ ID NO: 33191 - DNA, 18 bp, Artificial Sequence
  Probe
gtggttaggattcggcgc

SEQ ID NO: 33192 - DNA, 19 bp, Artificial Sequence
  Probe
gtggttaggattcggcgct

SEQ ID NO: 33193 - DNA, 20 bp, Artificial Sequence
  Probe
gtggttaggattcggcgctc

SEQ ID NO: 33194 - DNA, 25 bp, Artificial Sequence
  Probe
gtggttaggattcggcgctctcacc

SEQ ID NO: 33195 - DNA, 34 bp, Artificial Sequence
  Probe
gtggttaggattcggcgctctcaccgccgcggcc

SEQ ID NO: 33196 - DNA, 39 bp, Artificial Sequence; identical to SEQ ID NO: 14108
  Probe

SEQ ID NO: 33197 - DNA, 15 bp, Artificial Sequence
  Probe
gtggttagtactctg

SEQ ID NO: 33198 - DNA, 16 bp, Artificial Sequence
  Probe
gtggttagtactctgc

SEQ ID NO: 33199 - DNA, 17 bp, Artificial Sequence
  Probe
gtggttagtactctgcg

SEQ ID NO: 33200 - DNA, 18 bp, Artificial Sequence
  Probe
gtggttagtactctgcgt

SEQ ID NO: 33201 - DNA, 20 bp, Artificial Sequence
  Probe
gtggttagtactctgcgttg

SEQ ID NO: 33202 - DNA, 17 bp, Artificial Sequence
  Probe
gtggttatcacgtctgc

SEQ ID NO: 33203 - DNA, 18 bp, Artificial Sequence
  Probe
gtggttatcacgtctgct

SEQ ID NO: 33204 - DNA, 19 bp, Artificial Sequence
  Probe
gtggttatcacgtctgctt

SEQ ID NO: 33205 - DNA, 20 bp, Artificial Sequence
  Probe
gtggttatcacgtctgcttt

SEQ ID NO: 33206 - DNA, 21 bp, Artificial Sequence
  Probe
gtggttatcacgtctgcttta

SEQ ID NO: 33207 - DNA, 22 bp, Artificial Sequence
  Probe
gtggttatcacgtctgctttac

SEQ ID NO: 33208 - DNA, 25 bp, Artificial Sequence
  Probe
gtggttatcacgtctgctttacacg

SEQ ID NO: 33209 - DNA, 17 bp, Artificial Sequence
  Probe
gtggttatcacgttcgc

SEQ ID NO: 33210 - DNA, 18 bp, Artificial Sequence
  Probe
gtggttatcacgttcgcc

SEQ ID NO: 33211 - DNA, 25 bp, Artificial Sequence
  Probe
gtggttatcacgttcgcctaacacg

SEQ ID NO: 33212 - DNA, 20 bp, Artificial Sequence
  Probe
gtggttatcacgttcgcctc

SEQ ID NO: 33213 - DNA, 21 bp, Artificial Sequence
  Probe
gtggttatcacgttcgcctca

SEQ ID NO: 33214 - DNA, 22 bp, Artificial Sequence
  Probe
gtggttatcacgttcgcctcac

SEQ ID NO: 33215 - DNA, 25 bp, Artificial Sequence
  Probe
gtggttatcacgttcgcctcacacg

SEQ ID NO: 33216 - DNA, 25 bp, Artificial Sequence
  Probe
gtggttcagtggtagaattctcgcc

SEQ ID NO: 33217 - DNA, 26 bp, Artificial Sequence
  Probe
gtggttcagtggtagaattctcgcct

SEQ ID NO: 33218 - DNA, 29 bp, Artificial Sequence
  Probe
gtggttcagtggtagaattctcgcctgcc

SEQ ID NO: 33219 - DNA, 36 bp, Artificial Sequence
  Probe
gtggttcagtggtagaattctcgcctgccacgcggg

SEQ ID NO: 33220 - DNA, 15 bp, Artificial Sequence
  Probe
gtggttctaacttgc

SEQ ID NO: 33221 - DNA, 28 bp, Artificial Sequence
  Probe
gtggttctaacttgctggggtggcggtt

SEQ ID NO: 33222 - DNA, 29 bp, Artificial Sequence
  Probe
gtggttctaacttgctggggtggcggttt

SEQ ID NO: 33223 - DNA, 36 bp, Artificial Sequence
  Probe
gtggttgggggtgtagctcagtggtagagcgcgtgc

SEQ ID NO: 33224 - DNA, 16 bp, Artificial Sequence
  Probe
gtggttgtagtccgtg

SEQ ID NO: 33225 - DNA, 17 bp, Artificial Sequence
  Probe
gtggttgtagtccgtgc

SEQ ID NO: 33226 - DNA, 18 bp, Artificial Sequence
  Probe
gtggttgtagtccgtgcg

SEQ ID NO: 33227 - DNA, 19 bp, Artificial Sequence
  Probe
gtggttgtagtccgtgcga

SEQ ID NO: 33228 - DNA, 20 bp, Artificial Sequence
  Probe
gtggttgtagtccgtgcgag

SEQ ID NO: 33229 - DNA, 25 bp, Artificial Sequence
  Probe
gtggttgtagtccgtgcgagaataa

SEQ ID NO: 33230 - DNA, 36 bp, Artificial Sequence
  Probe
gtggttgtagtccgtgcgagaataatgatgtatgct

SEQ ID NO: 33231 - DNA, 36 bp, Artificial Sequence
  Probe
gtggtttccgtagtgtagtggttatcacgttcgcct

SEQ ID NO: 33232 - DNA, 16 bp, Artificial Sequence
  Probe
gtgtaagcagggtcgt

SEQ ID NO: 33233 - DNA, 17 bp, Artificial Sequence
  Probe
gtgtaagcagggtcgtt

SEQ ID NO: 33234 - DNA, 18 bp, Artificial Sequence
  Probe
gtgtaagcagggtcgttt

SEQ ID NO: 33235 - DNA, 19 bp, Artificial Sequence
  Probe
gtgtaagcagggtcgtttt

SEQ ID NO: 33236 - DNA, 20 bp, Artificial Sequence
  Probe
gtgtaagcagggtcgtttta

SEQ ID NO: 33237 - DNA, 30 bp, Artificial Sequence
  Probe
gtgtaatggtgagcactctggactctgaat

SEQ ID NO: 33238 - DNA, 36 bp, Artificial Sequence
  Probe
gtgtaatggtgagcactctggactctgaatccagcg

SEQ ID NO: 33239 - DNA, 20 bp, Artificial Sequence
  Probe
gtgtaatggttagcactctg

SEQ ID NO: 33240 - DNA, 22 bp, Artificial Sequence
  Probe
gtgtaatggttagcactctgga

SEQ ID NO: 33241 - DNA, 23 bp, Artificial Sequence
  Probe
gtgtaatggttagcactctggac

SEQ ID NO: 33242 - DNA, 24 bp, Artificial Sequence
  Probe
gtgtaatggttagcactctggact

SEQ ID NO: 33243 - DNA, 25 bp, Artificial Sequence
  Probe
gtgtaatggttagcactctggactc

SEQ ID NO: 33244 - DNA, 30 bp, Artificial Sequence
  Probe
gtgtaatggttagcactctggactctgaat

SEQ ID NO: 33245 - DNA, 31 bp, Artificial Sequence
  Probe
gtgtaatggttagcactctggactctgaatc

SEQ ID NO: 33246 - DNA, 32 bp, Artificial Sequence
  Probe
gtgtaatggttagcactctggactctgaatcc

SEQ ID NO: 33247 - DNA, 43 bp, Artificial Sequence
  Probe
gtgtaatggttagcactctggactctgaatccagcgatccgag

SEQ ID NO: 33248 - DNA, 44 bp, Artificial Sequence
  Probe
gtgtaatggttagcactctggactctgaatccagcgatccgagt

SEQ ID NO: 33249 - DNA, 45 bp, Artificial Sequence
  Probe
gtgtaatggttagcactctggactctgaatccagcgatccgagtt

SEQ ID NO: 33250 - DNA, 46 bp, Artificial Sequence
  Probe
gtgtaatggttagcactctggactctgaatccagcgatccgagttc

SEQ ID NO: 33251 - DNA, 31 bp, Artificial Sequence
  Probe
gtgtaatggttagcactctggactttgaatc

SEQ ID NO: 33252 - DNA, 32 bp, Artificial Sequence
  Probe
gtgtaatggttagcactctggactttgaatcc

SEQ ID NO: 33253 - DNA, 36 bp, Artificial Sequence
  Probe
gtgtaatggttagcactctggactttgaatccagcg

SEQ ID NO: 33254 - DNA, 45 bp, Artificial Sequence
  Probe
gtgtaatggttagcactctggactttgaatccagcgatccgagtt

SEQ ID NO: 33255 - DNA, 36 bp, Artificial Sequence
  Probe
gtgtagagagcctggatagctcagtcggtagagcat

SEQ ID NO: 33256 - DNA, 26 bp, Artificial Sequence
  Probe
gtgtagaggccttggtggtgcagtgg

SEQ ID NO: 33257 - DNA, 17 bp, Artificial Sequence
  Probe
gtgtagtcgtggccgag

SEQ ID NO: 33258 - DNA, 18 bp, Artificial Sequence
  Probe
gtgtagtcgtggccgagt

SEQ ID NO: 33259 - DNA, 19 bp, Artificial Sequence
  Probe
gtgtagtcgtggccgagtg

SEQ ID NO: 33260 - DNA, 36 bp, Artificial Sequence
  Probe
gtgtagtcgtggccgagtggttaaggcgatggacta

SEQ ID NO: 33261 - DNA, 23 bp, Artificial Sequence
  Probe
gtgtagtggttatcacgttcgcc

SEQ ID NO: 33262 - DNA, 25 bp, Artificial Sequence
  Probe
gtgtagtggttatcacgttcgcctc

SEQ ID NO: 33263 - DNA, 15 bp, Artificial Sequence
  Probe
gtgtccctagtagct

SEQ ID NO: 33264 - DNA, 16 bp, Artificial Sequence
  Probe
gtgtccctagtagctc

SEQ ID NO: 33265 - DNA, 17 bp, Artificial Sequence
  Probe
gtgtccctagtagctcg

SEQ ID NO: 33266 - DNA, 20 bp, Artificial Sequence
  Probe
gtgtccctagtagctcgccg

SEQ ID NO: 33267 - DNA, 24 bp, Artificial Sequence
  Probe
gtgtccctagtagctcgccgtgat

SEQ ID NO: 33268 - DNA, 31 bp, Artificial Sequence
  Probe
gtgtccctagtagctcgccgtgatcgtatag

SEQ ID NO: 33269 - DNA, 36 bp, Artificial Sequence
  Probe
gtgtccctagtagctcgccgtgatcgtatagtggtt

SEQ ID NO: 33270 - DNA, 33 bp, Artificial Sequence
  Probe
gtgtccctggtggtctagtggctaggattcggc

SEQ ID NO: 33271 - DNA, 36 bp, Artificial Sequence
  Probe
gtgtccttcgatagctcagttggtagagcggaggac

SEQ ID NO: 33272 - DNA, 44 bp, Artificial Sequence
  Probe
gtgtccttcgatagctcagttggtagagcggaggactgtaggct

SEQ ID NO: 33273 - DNA, 18 bp, Artificial Sequence
  Probe
gtgtcgcccggctagctc

SEQ ID NO: 33274 - DNA, 36 bp, Artificial Sequence
  Probe
gtgtcgcccggctagctcagtcggtagagcatgaga

SEQ ID NO: 33275 - DNA, 36 bp, Artificial Sequence
  Probe
gtgtcggctcgttggtctaggggtatgattctcgct

SEQ ID NO: 33276 - DNA, 33 bp, Artificial Sequence
  Probe
gtgtctggctctgtggcgcaatggatagcgcat

SEQ ID NO: 33277 - DNA, 36 bp, Artificial Sequence
  Probe
gtgtgaatccttcgatagctcagttggtagagcgga

SEQ ID NO: 33278 - DNA, 36 bp, Artificial Sequence
  Probe
gtgtgacgaggtggccgagtggttaaggcgatggac

SEQ ID NO: 33279 - DNA, 15 bp, Artificial Sequence
  Probe
gtgtgaggtattttt

SEQ ID NO: 33280 - DNA, 16 bp, Artificial Sequence
  Probe
gtgtgaggtcccgggt

SEQ ID NO: 33281 - DNA, 36 bp, Artificial Sequence
  Probe
gtgtggctcgttggtctaggggtatgattctcgctt

SEQ ID NO: 33282 - DNA, 36 bp, Artificial Sequence
  Probe
gtgtggtttccgtagtgtagtggttatcacgttcgc

SEQ ID NO: 33283 - DNA, 38 bp, Artificial Sequence
  Probe
gtgtggtttccgtagtgtagtggttatcacgttcgcct

SEQ ID NO: 33284 - DNA, 15 bp, Artificial Sequence
  Probe
gtgtgtagctgcact

SEQ ID NO: 33285 - DNA, 36 bp, Artificial Sequence
  Probe
gtgtgtggtagtgtggccgagcggtctaaggcgctg

SEQ ID NO: 33286 - DNA, 32 bp, Artificial Sequence; identical to SEQ ID NO: 7107
  Probe

SEQ ID NO: 33287 - DNA, 20 bp, Artificial Sequence
  Probe
gttaaagactttttctctga

SEQ ID NO: 33288 - DNA, 21 bp, Artificial Sequence
  Probe
gttaaagactttttctctgat

SEQ ID NO: 33289 - DNA, 18 bp, Artificial Sequence
  Probe
gttaaagattaagagaac

SEQ ID NO: 33290 - DNA, 19 bp, Artificial Sequence
  Probe
gttaaagattaagagaacc

SEQ ID NO: 33291 - DNA, 20 bp, Artificial Sequence
  Probe
gttaaagattaagagaacca

SEQ ID NO: 33292 - DNA, 22 bp, Artificial Sequence
  Probe
gttaaagattaagagaaccaac

SEQ ID NO: 33293 - DNA, 23 bp, Artificial Sequence
  Probe
gttaaagattaagagaaccaaca

SEQ ID NO: 33294 - DNA, 24 bp, Artificial Sequence
  Probe
gttaaagattaagagaaccaacac

SEQ ID NO: 33295 - DNA, 25 bp, Artificial Sequence
  Probe
gttaaagattaagagaaccaacacc

SEQ ID NO: 33296 - DNA, 26 bp, Artificial Sequence
  Probe
gttaaagattaagagaaccaacacct

SEQ ID NO: 33297 - DNA, 27 bp, Artificial Sequence
  Probe
gttaaagattaagagaaccaacacctc

SEQ ID NO: 33298 - DNA, 28 bp, Artificial Sequence
  Probe
gttaaagattaagagaaccaacacctct

SEQ ID NO: 33299 - DNA, 36 bp, Artificial Sequence; identical to SEQ ID NO: 7116
  Probe

SEQ ID NO: 33300 - DNA, 38 bp, Artificial Sequence; identical to SEQ ID NO: 7118
  Probe

SEQ ID NO: 33301 - DNA, 39 bp, Artificial Sequence; identical to SEQ ID NO: 7119
  Probe

SEQ ID NO: 33302 - DNA, 21 bp, Artificial Sequence
  Probe
gttaaatacagaccaagagcc

SEQ ID NO: 33303 - DNA, 15 bp, Artificial Sequence
  Probe
gttaaattataggct

SEQ ID NO: 33304 - DNA, 17 bp, Artificial Sequence
  Probe
gttaaattataggctaa

SEQ ID NO: 33305 - DNA, 23 bp, Artificial Sequence
  Probe
gttaactaagtgtttgtgggttt

SEQ ID NO: 33306 - DNA, 28 bp, Artificial Sequence
  Probe
gttaactaagtgtttgtgggtttaagtc

SEQ ID NO: 33307 - DNA, 42 bp, Artificial Sequence; identical to SEQ ID NO: 22941
  Probe

SEQ ID NO: 33308 - DNA, 43 bp, Artificial Sequence; identical to SEQ ID NO: 7129
  Probe

SEQ ID NO: 33309 - DNA, 18 bp, Artificial Sequence
  Probe
gttaagacggcagagccc

SEQ ID NO: 33310 - DNA, 16 bp, Artificial Sequence
  Probe
gttaagatggcagagc

SEQ ID NO: 33311 - DNA, 17 bp, Artificial Sequence
  Probe
gttaagatggcagagcc

SEQ ID NO: 33312 - DNA, 18 bp, Artificial Sequence
  Probe
gttaagatggcagagccc

SEQ ID NO: 33313 - DNA, 19 bp, Artificial Sequence
  Probe
gttaagatggcagagcccg

SEQ ID NO: 33314 - DNA, 20 bp, Artificial Sequence
  Probe
gttaagatggcagagcccgg

SEQ ID NO: 33315 - DNA, 21 bp, Artificial Sequence
  Probe
gttaagatggcagagcccggc

SEQ ID NO: 33316 - DNA, 22 bp, Artificial Sequence
  Probe
gttaagatggcagagcccggca

SEQ ID NO: 33317 - DNA, 23 bp, Artificial Sequence
  Probe
gttaagatggcagagcccggtaa

SEQ ID NO: 33318 - DNA, 27 bp, Artificial Sequence
  Probe
gttaagatggcagagcccggtaatcgc

SEQ ID NO: 33319 - DNA, 38 bp, Artificial Sequence; identical to SEQ ID NO: 7140
  Probe

SEQ ID NO: 33320 - DNA, 39 bp, Artificial Sequence; identical to SEQ ID NO: 7141
  Probe

SEQ ID NO: 33321 - DNA, 40 bp, Artificial Sequence; identical to SEQ ID NO: 22959
  Probe

SEQ ID NO: 33322 - DNA, 44 bp, Artificial Sequence; identical to SEQ ID NO: 22962
  Probe

SEQ ID NO: 33323 - DNA, 45 bp, Artificial Sequence; identical to SEQ ID NO: 7144
  Probe

SEQ ID NO: 33324 - DNA, 46 bp, Artificial Sequence
  Probe
gttaagatggcagagcccggtaatcgcataaaacttaaaactttac

SEQ ID NO: 33325 - DNA, 47 bp, Artificial Sequence
  Probe
gttaagatggcagagcccggtaatcgcataaaacttaaaactttaca

SEQ ID NO: 33326 - DNA, 50 bp, Artificial Sequence; identical to SEQ ID NO: 7145
  Probe

SEQ ID NO: 33327 - DNA, 18 bp, Artificial Sequence
  Probe
gttaagatggcagagcct

SEQ ID NO: 33328 - DNA, 16 bp, Artificial Sequence
  Probe
gttagcactctggact

SEQ ID NO: 33329 - DNA, 21 bp, Artificial Sequence
  Probe
gttagcactctggactctgaa

SEQ ID NO: 33330 - DNA, 22 bp, Artificial Sequence
  Probe
gttagcactctggactctgaat

SEQ ID NO: 33331 - DNA, 23 bp, Artificial Sequence
  Probe
gttagcactctggactctgaatc

SEQ ID NO: 33332 - DNA, 33 bp, Artificial Sequence
  Probe
gttagcactctggactctgaatccagcgatccg

SEQ ID NO: 33333 - DNA, 35 bp, Artificial Sequence
  Probe
gttagcactctggactctgaatccagcgatccgag

SEQ ID NO: 33334 - DNA, 37 bp, Artificial Sequence
  Probe
gttagcactctggactctgaatccagcgatccgagtt

SEQ ID NO: 33335 - DNA, 38 bp, Artificial Sequence
  Probe
gttagcactctggactctgaatccagcgatccgagttc

SEQ ID NO: 33336 - DNA, 39 bp, Artificial Sequence
  Probe
gttagcactctggactctgaatccagcgatccgagttca

SEQ ID NO: 33337 - DNA, 36 bp, Artificial Sequence
  Probe
gttagcactctggactttgaatccagcaatccgagt

SEQ ID NO: 33338 - DNA, 37 bp, Artificial Sequence
  Probe
gttagcactctggactttgaatccagcgatccgagtt

SEQ ID NO: 33339 - DNA, 38 bp, Artificial Sequence
  Probe
gttagcactctggactttgaatccagcgatccgagttc

SEQ ID NO: 33340 - DNA, 39 bp, Artificial Sequence
  Probe
gttagcactctggactttgaatccagcgatccgagttca

SEQ ID NO: 33341 - DNA, 15 bp, Artificial Sequence
  Probe
gttaggattcggcgc

SEQ ID NO: 33342 - DNA, 16 bp, Artificial Sequence
  Probe
gttaggattcggcgct

SEQ ID NO: 33343 - DNA, 18 bp, Artificial Sequence
  Probe
gttaggattcggcgctct

SEQ ID NO: 33344 - DNA, 22 bp, Artificial Sequence
  Probe
gttaggattcggcgctctcacc

SEQ ID NO: 33345 - DNA, 23 bp, Artificial Sequence
  Probe
gttaggattcggcgctctcaccg

SEQ ID NO: 33346 - DNA, 18 bp, Artificial Sequence
  Probe
gttaggcctctttttacc

SEQ ID NO: 33347 - DNA, 21 bp, Artificial Sequence
  Probe
gttaggcctctttttaccagc

SEQ ID NO: 33348 - DNA, 15 bp, Artificial Sequence
  Probe
gttagtactctgcgt

SEQ ID NO: 33349 - DNA, 16 bp, Artificial Sequence
  Probe
gttagtactctgcgtt

SEQ ID NO: 33350 - DNA, 17 bp, Artificial Sequence
  Probe
gttagtactctgcgttg

SEQ ID NO: 33351 - DNA, 15 bp, Artificial Sequence
  Probe
gttagtatccccgcc

SEQ ID NO: 33352 - DNA, 19 bp, Artificial Sequence
  Probe
gttagtatccccgcctgtc

SEQ ID NO: 33353 - DNA, 25 bp, Artificial Sequence
  Probe
gttagtctaggctgtcagctcttcc

SEQ ID NO: 33354 - DNA, 19 bp, Artificial Sequence
  Probe
gttatacccttcccgtact

SEQ ID NO: 33355 - DNA, 17 bp, Artificial Sequence
  Probe
gttatcacgtctgcttt

SEQ ID NO: 33356 - DNA, 22 bp, Artificial Sequence
  Probe
gttatcacgtctgctttacacg

SEQ ID NO: 33357 - DNA, 15 bp, Artificial Sequence
  Probe
gttatcacgttcgcc

SEQ ID NO: 33358 - DNA, 22 bp, Artificial Sequence
  Probe
gttatcacgttcgcctaacacg

SEQ ID NO: 33359 - DNA, 22 bp, Artificial Sequence
  Probe
gttatcacgttcgcctcacacg

SEQ ID NO: 33360 - DNA, 15 bp, Artificial Sequence
  Probe
gttatgaaatggttt

SEQ ID NO: 33361 - DNA, 22 bp, Artificial Sequence
  Probe
gttcaaatcccggacgagccct

SEQ ID NO: 33362 - DNA, 21 bp, Artificial Sequence
  Probe
gttcaagtccctgttcgggcg

SEQ ID NO: 33363 - DNA, 23 bp, Artificial Sequence
  Probe
gttcaattcccggtcagggaacc

SEQ ID NO: 33364 - DNA, 24 bp, Artificial Sequence
  Probe
gttcaattcccggtcagggaacca

SEQ ID NO: 33365 - DNA, 15 bp, Artificial Sequence
  Probe
gttcaggtcgcagtc

SEQ ID NO: 33366 - DNA, 19 bp, Artificial Sequence
  Probe
gttcaggtcgcagtctccc

SEQ ID NO: 33367 - DNA, 21 bp, Artificial Sequence
  Probe
gttcagtggtagaattctcgc

SEQ ID NO: 33368 - DNA, 22 bp, Artificial Sequence
  Probe
gttcagtggtagaattctcgcc

SEQ ID NO: 33369 - DNA, 23 bp, Artificial Sequence
  Probe
gttcagtggtagaattctcgcct

SEQ ID NO: 33370 - DNA, 26 bp, Artificial Sequence
  Probe
gttcagtggtagaattctcgcctccc

SEQ ID NO: 33371 - DNA, 36 bp, Artificial Sequence
  Probe
gttcagtggtagaattctcgcctcccacgcgggaga

SEQ ID NO: 33372 - DNA, 24 bp, Artificial Sequence
  Probe
gttcagtggtagaattctcgcctg

SEQ ID NO: 33373 - DNA, 25 bp, Artificial Sequence
  Probe
gttcagtggtagaattctcgcctgc

SEQ ID NO: 33374 - DNA, 26 bp, Artificial Sequence
  Probe
gttcagtggtagaattctcgcctgcc

SEQ ID NO: 33375 - DNA, 27 bp, Artificial Sequence
  Probe
gttcagtggtagaattctcgcctgcca

SEQ ID NO: 33376 - DNA, 36 bp, Artificial Sequence
  Probe
gttcagtggtagaattctcgcctgccacgcgggagg

SEQ ID NO: 33377 - DNA, 30 bp, Artificial Sequence; identical to SEQ ID NO: 14124
  Probe

SEQ ID NO: 33378 - DNA, 50 bp, Artificial Sequence
  Probe
gttccatggtgtaatggttagcactctggactctgaatccagcgatccga

SEQ ID NO: 33379 - DNA, 36 bp, Artificial Sequence
  Probe
gttccctggtggtctagtggttaggattcggcgctc

SEQ ID NO: 33380 - DNA, 15 bp, Artificial Sequence
  Probe
gttccttctactttt

SEQ ID NO: 33381 - DNA, 30 bp, Artificial Sequence
  Probe
gttccttgtccggtttatgtctcttggttt

SEQ ID NO: 33382 - DNA, 31 bp, Artificial Sequence
  Probe
gttcgatccccggcatctccattgtagtttt

SEQ ID NO: 33383 - DNA, 23 bp, Artificial Sequence
  Probe
gttcgattccccgacggggagac

SEQ ID NO: 33384 - DNA, 23 bp, Artificial Sequence
  Probe
gttcgattccccgacggggaggc

SEQ ID NO: 33385 - DNA, 24 bp, Artificial Sequence
  Probe
gttcgattccccgacggggaggca

SEQ ID NO: 33386 - DNA, 15 bp, Artificial Sequence
  Probe
gttcgattcccggcc

SEQ ID NO: 33387 - DNA, 15 bp, Artificial Sequence
  Probe
gttcgattcccgggc

SEQ ID NO: 33388 - DNA, 23 bp, Artificial Sequence
  Probe
gttcgattcccggtcagggaaca

SEQ ID NO: 33389 - DNA, 24 bp, Artificial Sequence
  Probe
gttcgattcccggtcagggaacaa

SEQ ID NO: 33390 - DNA, 23 bp, Artificial Sequence
  Probe
gttcgattcccggtcagggaagc

SEQ ID NO: 33391 - DNA, 23 bp, Artificial Sequence
  Probe
gttcgattcccggtcatggaacc

SEQ ID NO: 33392 - DNA, 24 bp, Artificial Sequence
  Probe
gttcgattcccggtcatggaacca

SEQ ID NO: 33393 - DNA, 23 bp, Artificial Sequence
  Probe
gttcgattcctggtcagggaacc

SEQ ID NO: 33394 - DNA, 24 bp, Artificial Sequence
  Probe
gttcgattcctggtcagggaacca

SEQ ID NO: 33395 - DNA, 23 bp, Artificial Sequence
  Probe
gttcgattccttccttttttgtc

SEQ ID NO: 33396 - DNA, 36 bp, Artificial Sequence
  Probe
gttctggctcgttggtctagtggtatgattctcgct

SEQ ID NO: 33397 - DNA, 15 bp, Artificial Sequence
  Probe
gttcttgtagttgaa

SEQ ID NO: 33398 - DNA, 16 bp, Artificial Sequence
  Probe
gttcttgtagttgaaa

SEQ ID NO: 33399 - DNA, 17 bp, Artificial Sequence
  Probe
gttcttgtagttgaaat

SEQ ID NO: 33400 - DNA, 18 bp, Artificial Sequence
  Probe
gttcttgtagttgaaata

SEQ ID NO: 33401 - DNA, 19 bp, Artificial Sequence
  Probe
gttcttgtagttgaaatac

SEQ ID NO: 33402 - DNA, 20 bp, Artificial Sequence
  Probe
gttcttgtagttgaaataca

SEQ ID NO: 33403 - DNA, 22 bp, Artificial Sequence
  Probe
gttcttgtagttgaaatacaac

SEQ ID NO: 33404 - DNA, 23 bp, Artificial Sequence
  Probe
gttcttgtagttgaaatacaacg

SEQ ID NO: 33405 - DNA, 26 bp, Artificial Sequence
  Probe
gttcttgtagttgaaatacaacgatg

SEQ ID NO: 33406 - DNA, 28 bp, Artificial Sequence
  Probe
gttcttgtagttgaaatacaacgatggt

SEQ ID NO: 33407 - DNA, 29 bp, Artificial Sequence
  Probe
gttcttgtagttgaaatacaacgatggtt

SEQ ID NO: 33408 - DNA, 32 bp, Artificial Sequence; identical to SEQ ID NO: 7197
  Probe

SEQ ID NO: 33409 - DNA, 33 bp, Artificial Sequence; identical to SEQ ID NO: 7198
  Probe

SEQ ID NO: 33410 - DNA, 34 bp, Artificial Sequence; identical to SEQ ID NO: 7199
  Probe

SEQ ID NO: 33411 - DNA, 35 bp, Artificial Sequence
  Probe
gttcttgtagttgaaatacaacgatggtttttcat

SEQ ID NO: 33412 - DNA, 36 bp, Artificial Sequence; identical to SEQ ID NO: 23017
  Probe

SEQ ID NO: 33413 - DNA, 37 bp, Artificial Sequence
  Probe
gttcttgtagttgaaatacaacgatggtttttcatat

SEQ ID NO: 33414 - DNA, 38 bp, Artificial Sequence; identical to SEQ ID NO: 7200
  Probe

SEQ ID NO: 33415 - DNA, 39 bp, Artificial Sequence
  Probe
gttcttgtagttgaaatacaacgatggtttttcatatca

SEQ ID NO: 33416 - DNA, 40 bp, Artificial Sequence
  Probe
gttcttgtagttgaaatacaacgatggtttttcatatcat

SEQ ID NO: 33417 - DNA, 44 bp, Artificial Sequence; identical to SEQ ID NO: 7203
  Probe

SEQ ID NO: 33418 - DNA, 45 bp, Artificial Sequence; identical to SEQ ID NO: 7204
  Probe

SEQ ID NO: 33419 - DNA, 46 bp, Artificial Sequence; identical to SEQ ID NO: 1528
  Probe

SEQ ID NO: 33420 - DNA, 50 bp, Artificial Sequence; identical to SEQ ID NO: 1529
  Probe

SEQ ID NO: 33421 - DNA, 28 bp, Artificial Sequence
  Probe
gttgatgcagagtggggttttgcagtcc

SEQ ID NO: 33422 - DNA, 29 bp, Artificial Sequence
  Probe
gttgatgcagagtggggttttgcagtcct

SEQ ID NO: 33423 - DNA, 30 bp, Artificial Sequence; identical to SEQ ID NO: 14129
  Probe

SEQ ID NO: 33424 - DNA, 33 bp, Artificial Sequence; identical to SEQ ID NO: 23021
  Probe

SEQ ID NO: 33425 - DNA, 15 bp, Artificial Sequence
  Probe
gttgattagggtgct

SEQ ID NO: 33426 - DNA, 16 bp, Artificial Sequence
  Probe
gttgattagggtgctt

SEQ ID NO: 33427 - DNA, 20 bp, Artificial Sequence
  Probe
gttgattagggtgcttagct

SEQ ID NO: 33428 - DNA, 22 bp, Artificial Sequence
  Probe
gttgattagggtgcttagctgt

SEQ ID NO: 33429 - DNA, 23 bp, Artificial Sequence
  Probe
gttgattagggtgcttagctgtt

SEQ ID NO: 33430 - DNA, 26 bp, Artificial Sequence
  Probe
gttgattagggtgcttagctgttaac

SEQ ID NO: 33431 - DNA, 28 bp, Artificial Sequence
  Probe
gttgattagggtgcttagctgttaacta

SEQ ID NO: 33432 - DNA, 41 bp, Artificial Sequence
  Probe
gttgattagggtgcttagctgttaactaagtgtttgtgggt

SEQ ID NO: 33433 - DNA, 43 bp, Artificial Sequence
  Probe
gttgattagggtgcttagctgttaactaagtgtttgtgggttt

SEQ ID NO: 33434 - DNA, 21 bp, Artificial Sequence
  Probe
gttgggagagcgttagactga

SEQ ID NO: 33435 - DNA, 22 bp, Artificial Sequence
  Probe
gttgggagagcgttagactgaa

SEQ ID NO: 33436 - DNA, 18 bp, Artificial Sequence
  Probe
gttggtagagcatgggac

SEQ ID NO: 33437 - DNA, 20 bp, Artificial Sequence
  Probe
gttggtagagcatgggactc

SEQ ID NO: 33438 - DNA, 17 bp, Artificial Sequence
  Probe
gttggtagagcggagga

SEQ ID NO: 33439 - DNA, 18 bp, Artificial Sequence
  Probe
gttggtagagcggaggac

SEQ ID NO: 33440 - DNA, 22 bp, Artificial Sequence
  Probe
gttggtagagcggaggactgta

SEQ ID NO: 33441 - DNA, 23 bp, Artificial Sequence
  Probe
gttggtagagcggaggactgtag

SEQ ID NO: 33442 - DNA, 24 bp, Artificial Sequence
  Probe
gttggtagagcggaggactgtagt

SEQ ID NO: 33443 - DNA, 23 bp, Artificial Sequence
  Probe
gttggtctaggggtatgattctc

SEQ ID NO: 33444 - DNA, 25 bp, Artificial Sequence
  Probe
gttggtctaggggtatgattctcgc

SEQ ID NO: 33445 - DNA, 26 bp, Artificial Sequence
  Probe
gttggtctaggggtatgattctcgct

SEQ ID NO: 33446 - DNA, 30 bp, Artificial Sequence; identical to SEQ ID NO: 23033
  Probe

SEQ ID NO: 33447 - DNA, 36 bp, Artificial Sequence
  Probe
gttggtggtatagtggtgagcatagctgccttccaa

SEQ ID NO: 33448 - DNA, 19 bp, Artificial Sequence
  Probe
gttggttagagcgtggtgc

SEQ ID NO: 33449 - DNA, 36 bp, Artificial Sequence
  Probe
gttggtttccgtagtgtagtggttatcacgttcgcc

SEQ ID NO: 33450 - DNA, 37 bp, Artificial Sequence
  Probe
gttggtttccgtagtgtagtggttatcacgttcgcct

SEQ ID NO: 33451 - DNA, 17 bp, Artificial Sequence
  Probe
gttgtagtccgtgcgag

SEQ ID NO: 33452 - DNA, 18 bp, Artificial Sequence
  Probe
gttgtagtccgtgcgaga

SEQ ID NO: 33453 - DNA, 19 bp, Artificial Sequence
  Probe
gttgtagtccgtgcgagaa

SEQ ID NO: 33454 - DNA, 20 bp, Artificial Sequence
  Probe
gttgtagtccgtgcgagaat

SEQ ID NO: 33455 - DNA, 21 bp, Artificial Sequence
  Probe
gttgtagtccgtgcgagaata

SEQ ID NO: 33456 - DNA, 22 bp, Artificial Sequence
  Probe
gttgtagtccgtgcgagaataa

SEQ ID NO: 33457 - DNA, 33 bp, Artificial Sequence
  Probe
gttgttggccccatggtgtaatggttagcactc

SEQ ID NO: 33458 - DNA, 28 bp, Artificial Sequence
  Probe
gtttaaacaaaacgaatgatttcgactc

SEQ ID NO: 33459 - DNA, 29 bp, Artificial Sequence
  Probe
gtttaaacaaaacgaatgatttcgactca

SEQ ID NO: 33460 - DNA, 25 bp, Artificial Sequence
  Probe
gtttaaattagaatcttagctttgg

SEQ ID NO: 33461 - DNA, 26 bp, Artificial Sequence
  Probe
gtttaaattagaatcttagctttggg

SEQ ID NO: 33462 - DNA, 36 bp, Artificial Sequence
  Probe
gtttaaattagaatcttagctttgggtgctaatggt

SEQ ID NO: 33463 - DNA, 28 bp, Artificial Sequence
  Probe
gtttaaccaaaacatcagattgtgaatc

SEQ ID NO: 33464 - DNA, 36 bp, Artificial Sequence; identical to SEQ ID NO: 23054
  Probe

SEQ ID NO: 33465 - DNA, 42 bp, Artificial Sequence
  Probe
gtttaaccaaaacatcagattgtgaatctgacaacagaggct

SEQ ID NO: 33466 - DNA, 18 bp, Artificial Sequence
  Probe
gtttaagtcccattggtc

SEQ ID NO: 33467 - DNA, 19 bp, Artificial Sequence
  Probe
gtttaagtcccattggtct

SEQ ID NO: 33468 - DNA, 15 bp, Artificial Sequence
  Probe
gtttagacgggctca

SEQ ID NO: 33469 - DNA, 16 bp, Artificial Sequence
  Probe
gtttagacgggctcac

SEQ ID NO: 33470 - DNA, 17 bp, Artificial Sequence
  Probe
gtttagacgggctcaca

SEQ ID NO: 33471 - DNA, 18 bp, Artificial Sequence
  Probe
gtttagacgggctcacat

SEQ ID NO: 33472 - DNA, 19 bp, Artificial Sequence
  Probe
gtttagacgggctcacatc

SEQ ID NO: 33473 - DNA, 20 bp, Artificial Sequence
  Probe
gtttagacgggctcacatca

SEQ ID NO: 33474 - DNA, 21 bp, Artificial Sequence
  Probe
gtttagacgggctcacatcac

SEQ ID NO: 33475 - DNA, 22 bp, Artificial Sequence
  Probe
gtttagacgggctcacatcacc

SEQ ID NO: 33476 - DNA, 23 bp, Artificial Sequence
  Probe
gtttagacgggctcacatcaccc

SEQ ID NO: 33477 - DNA, 27 bp, Artificial Sequence
  Probe
gtttagacgggctcacatcaccccata

SEQ ID NO: 33478 - DNA, 28 bp, Artificial Sequence
  Probe
gtttagacgggctcacatcaccccataa

SEQ ID NO: 33479 - DNA, 29 bp, Artificial Sequence
  Probe
gtttagacgggctcacatcaccccataaa

SEQ ID NO: 33480 - DNA, 16 bp, Artificial Sequence
  Probe
gtttatgtagcttacc

SEQ ID NO: 33481 - DNA, 23 bp, Artificial Sequence
  Probe
gtttatgtagcttacctcctcaa

SEQ ID NO: 33482 - DNA, 24 bp, Artificial Sequence
  Probe
gtttatgtagcttacctcctcaaa

SEQ ID NO: 33483 - DNA, 26 bp, Artificial Sequence
  Probe
gtttatgtagcttacctcctcaaagc

SEQ ID NO: 33484 - DNA, 27 bp, Artificial Sequence
  Probe
gtttatgtagcttacctcctcaaagca

SEQ ID NO: 33485 - DNA, 30 bp, Artificial Sequence; identical to SEQ ID NO: 1536
  Probe

SEQ ID NO: 33486 - DNA, 32 bp, Artificial Sequence; identical to SEQ ID NO: 7245
  Probe

SEQ ID NO: 33487 - DNA, 34 bp, Artificial Sequence; identical to SEQ ID NO: 1538
  Probe

SEQ ID NO: 33488 - DNA, 35 bp, Artificial Sequence; identical to SEQ ID NO: 1539
  Probe

SEQ ID NO: 33489 - DNA, 37 bp, Artificial Sequence; identical to SEQ ID NO: 1541
  Probe

SEQ ID NO: 33490 - DNA, 50 bp, Artificial Sequence; identical to SEQ ID NO: 7251
  Probe

SEQ ID NO: 33491 - DNA, 32 bp, Artificial Sequence; identical to SEQ ID NO: 23082
  Probe

SEQ ID NO: 33492 - DNA, 34 bp, Artificial Sequence; identical to SEQ ID NO: 23084
  Probe

SEQ ID NO: 33493 - DNA, 36 bp, Artificial Sequence
  Probe
gtttccgtagtggagtggttatcacgttcgcctcac

SEQ ID NO: 33494 - DNA, 15 bp, Artificial Sequence
  Probe
gtttccgtagtgtag

SEQ ID NO: 33495 - DNA, 30 bp, Artificial Sequence; identical to SEQ ID NO: 8769
  Probe

SEQ ID NO: 33496 - DNA, 35 bp, Artificial Sequence; identical to SEQ ID NO: 1551
  Probe

SEQ ID NO: 33497 - DNA, 50 bp, Artificial Sequence; identical to SEQ ID NO: 7255
  Probe

SEQ ID NO: 33498 - DNA, 16 bp, Artificial Sequence
  Probe
gtttccgtagtgtagt

SEQ ID NO: 33499 - DNA, 18 bp, Artificial Sequence
  Probe
gtttccgtagtgtagtgg

SEQ ID NO: 33500 - DNA, 19 bp, Artificial Sequence
  Probe
gtttccgtagtgtagtggt

SEQ ID NO: 33501 - DNA, 29 bp, Artificial Sequence
  Probe
gtttccgtagtgtagtggtcatcacgttc

SEQ ID NO: 33502 - DNA, 30 bp, Artificial Sequence; identical to SEQ ID NO: 8772
  Probe

SEQ ID NO: 33503 - DNA, 31 bp, Artificial Sequence; identical to SEQ ID NO: 1559
  Probe

SEQ ID NO: 33504 - DNA, 34 bp, Artificial Sequence; identical to SEQ ID NO: 7259
  Probe

SEQ ID NO: 33505 - DNA, 35 bp, Artificial Sequence; identical to SEQ ID NO: 7260
  Probe

SEQ ID NO: 33506 - DNA, 36 bp, Artificial Sequence; identical to SEQ ID NO: 7261
  Probe

SEQ ID NO: 33507 - DNA, 37 bp, Artificial Sequence; identical to SEQ ID NO: 7262
  Probe

SEQ ID NO: 33508 - DNA, 39 bp, Artificial Sequence; identical to SEQ ID NO: 23108
  Probe

SEQ ID NO: 33509 - DNA, 42 bp, Artificial Sequence
  Probe
gtttccgtagtgtagtggtcatcacgttcgcctaacacgcga

SEQ ID NO: 33510 - DNA, 50 bp, Artificial Sequence; identical to SEQ ID NO: 7263
  Probe

SEQ ID NO: 33511 - DNA, 20 bp, Artificial Sequence
  Probe
gtttccgtagtgtagtggtt

SEQ ID NO: 33512 - DNA, 21 bp, Artificial Sequence
  Probe
gtttccgtagtgtagtggtta

SEQ ID NO: 33513 - DNA, 22 bp, Artificial Sequence
  Probe
gtttccgtagtgtagtggttat

SEQ ID NO: 33514 - DNA, 23 bp, Artificial Sequence
  Probe
gtttccgtagtgtagtggttatc

SEQ ID NO: 33515 - DNA, 24 bp, Artificial Sequence
  Probe
gtttccgtagtgtagtggttatca

SEQ ID NO: 33516 - DNA, 25 bp, Artificial Sequence
  Probe
gtttccgtagtgtagtggttatcac

SEQ ID NO: 33517 - DNA, 26 bp, Artificial Sequence
  Probe
gtttccgtagtgtagtggttatcacg

SEQ ID NO: 33518 - DNA, 27 bp, Artificial Sequence
  Probe
gtttccgtagtgtagtggttatcacgt

SEQ ID NO: 33519 - DNA, 28 bp, Artificial Sequence
  Probe
gtttccgtagtgtagtggttatcacgtt

SEQ ID NO: 33520 - DNA, 29 bp, Artificial Sequence
  Probe
gtttccgtagtgtagtggttatcacgttc

SEQ ID NO: 33521 - DNA, 30 bp, Artificial Sequence; identical to SEQ ID NO: 7273
  Probe

SEQ ID NO: 33522 - DNA, 31 bp, Artificial Sequence; identical to SEQ ID NO: 7274
  Probe

SEQ ID NO: 33523 - DNA, 32 bp, Artificial Sequence; identical to SEQ ID NO: 7275
  Probe

SEQ ID NO: 33524 - DNA, 33 bp, Artificial Sequence; identical to SEQ ID NO: 7276
  Probe

SEQ ID NO: 33525 - DNA, 34 bp, Artificial Sequence; identical to SEQ ID NO: 1562
  Probe

SEQ ID NO: 33526 - DNA, 35 bp, Artificial Sequence; identical to SEQ ID NO: 23123
  Probe

SEQ ID NO: 33527 - DNA, 36 bp, Artificial Sequence; identical to SEQ ID NO: 23124
  Probe

SEQ ID NO: 33528 - DNA, 39 bp, Artificial Sequence
  Probe
gtttccgtagtgtagtggttatcacgttcgcctaacacg

SEQ ID NO: 33529 - DNA, 40 bp, Artificial Sequence; identical to SEQ ID NO: 23125
  Probe

SEQ ID NO: 33530 - DNA, 41 bp, Artificial Sequence; identical to SEQ ID NO: 23126
  Probe

SEQ ID NO: 33531 - DNA, 42 bp, Artificial Sequence
  Probe
gtttccgtagtgtagtggttatcacgttcgcctaacacgcga

SEQ ID NO: 33532 - DNA, 43 bp, Artificial Sequence
  Probe
gtttccgtagtgtagtggttatcacgttcgcctaacacgcgaa

SEQ ID NO: 33533 - DNA, 50 bp, Artificial Sequence; identical to SEQ ID NO: 7277
  Probe

SEQ ID NO: 33534 - DNA, 34 bp, Artificial Sequence; identical to SEQ ID NO: 7278
  Probe

SEQ ID NO: 33535 - DNA, 35 bp, Artificial Sequence; identical to SEQ ID NO: 7279
  Probe

SEQ ID NO: 33536 - DNA, 36 bp, Artificial Sequence; identical to SEQ ID NO: 7280
  Probe

SEQ ID NO: 33537 - DNA, 37 bp, Artificial Sequence; identical to SEQ ID NO: 7281
  Probe

SEQ ID NO: 33538 - DNA, 38 bp, Artificial Sequence; identical to SEQ ID NO: 1563
  Probe

SEQ ID NO: 33539 - DNA, 39 bp, Artificial Sequence; identical to SEQ ID NO: 14159
  Probe

SEQ ID NO: 33540 - DNA, 40 bp, Artificial Sequence; identical to SEQ ID NO: 14160
  Probe

SEQ ID NO: 33541 - DNA, 41 bp, Artificial Sequence; identical to SEQ ID NO: 23134
  Probe

SEQ ID NO: 33542 - DNA, 42 bp, Artificial Sequence; identical to SEQ ID NO: 23135
  Probe

SEQ ID NO: 33543 - DNA, 43 bp, Artificial Sequence
  Probe
gtttccgtagtgtagtggttatcacgttcgcctcacacgcgaa

SEQ ID NO: 33544 - DNA, 32 bp, Artificial Sequence; identical to SEQ ID NO: 23138
  Probe

SEQ ID NO: 33545 - DNA, 34 bp, Artificial Sequence; identical to SEQ ID NO: 23140
  Probe

SEQ ID NO: 33546 - DNA, 36 bp, Artificial Sequence
  Probe
gtttccgtagtgtagtggttatcacgtttgcctaac

SEQ ID NO: 33547 - DNA, 32 bp, Artificial Sequence; identical to SEQ ID NO: 23144
  Probe

SEQ ID NO: 33548 - DNA, 33 bp, Artificial Sequence; identical to SEQ ID NO: 7282
  Probe

SEQ ID NO: 33549 - DNA, 36 bp, Artificial Sequence
  Probe
gtttccgtgcttccttcgatagctcagctggtagag

SEQ ID NO: 33550 - DNA, 32 bp, Artificial Sequence; identical to SEQ ID NO: 7284
  Probe

SEQ ID NO: 33551 - DNA, 33 bp, Artificial Sequence; identical to SEQ ID NO: 7285
  Probe

SEQ ID NO: 33552 - DNA, 34 bp, Artificial Sequence; identical to SEQ ID NO: 23153
  Probe

SEQ ID NO: 33553 - DNA, 36 bp, Artificial Sequence
  Probe
gtttccgtggtgtagtggttatcacattcgccttac

SEQ ID NO: 33554 - DNA, 16 bp, Artificial Sequence
  Probe
gtttcggcacttcctc

SEQ ID NO: 33555 - DNA, 15 bp, Artificial Sequence
  Probe
gtttggtcctagcct

SEQ ID NO: 33556 - DNA, 25 bp, Artificial Sequence
  Probe
gtttggtcctagcctttctattagc

SEQ ID NO: 33557 - DNA, 15 bp, Artificial Sequence
  Probe
gtttgtgggtttaag

SEQ ID NO: 33558 - DNA, 16 bp, Artificial Sequence
  Probe
gtttgtgggtttaagt

SEQ ID NO: 33559 - DNA, 17 bp, Artificial Sequence
  Probe
gtttgtgggtttaagtc

SEQ ID NO: 33560 - DNA, 18 bp, Artificial Sequence
  Probe
gtttgtgggtttaagtcc

SEQ ID NO: 33561 - DNA, 19 bp, Artificial Sequence
  Probe
gtttgtgggtttaagtccc

SEQ ID NO: 33562 - DNA, 20 bp, Artificial Sequence
  Probe
gtttgtgggtttaagtccca

SEQ ID NO: 33563 - DNA, 21 bp, Artificial Sequence
  Probe
gtttgtgggtttaagtcccat

SEQ ID NO: 33564 - DNA, 22 bp, Artificial Sequence
  Probe
gtttgtgggtttaagtcccatt

SEQ ID NO: 33565 - DNA, 23 bp, Artificial Sequence
  Probe
gtttgtgggtttaagtcccattg

SEQ ID NO: 33566 - DNA, 25 bp, Artificial Sequence
  Probe
gtttgtgggtttaagtcccattggt

SEQ ID NO: 33567 - DNA, 26 bp, Artificial Sequence
  Probe
gtttgtgggtttaagtcccattggtc

SEQ ID NO: 33568 - DNA, 27 bp, Artificial Sequence
  Probe
gtttgtgggtttaagtcccattggtct

SEQ ID NO: 33569 - DNA, 28 bp, Artificial Sequence
  Probe
gtttgtgggtttaagtcccattggtcta

SEQ ID NO: 33570 - DNA, 29 bp, Artificial Sequence
  Probe
gtttgtgggtttaagtcccattggtctag

SEQ ID NO: 33571 - DNA, 30 bp, Artificial Sequence; identical to SEQ ID NO: 7300
  Probe

SEQ ID NO: 33572 - DNA, 31 bp, Artificial Sequence; identical to SEQ ID NO: 7301
  Probe

SEQ ID NO: 33573 - DNA, 32 bp, Artificial Sequence; identical to SEQ ID NO: 7302
  Probe

SEQ ID NO: 33574 - DNA, 15 bp, Artificial Sequence
  Probe
gtttgtggtagtttt

SEQ ID NO: 33575 - DNA, 22 bp, Artificial Sequence
  Probe
gtttgttaagatggcagagccc

SEQ ID NO: 33576 - DNA, 29 bp, Artificial Sequence
  Probe
gttttggagtaagaatcacttaaaggtga

SEQ ID NO: 33577 - DNA, 19 bp, Artificial Sequence
  Probe
gtttttcatatcattggtc

SEQ ID NO: 33578 - DNA, 20 bp, Artificial Sequence
  Probe
gtttttcatatcattggtcg

SEQ ID NO: 33579 - DNA, 25 bp, Artificial Sequence
  Probe
gtttttcatatcattggtcgtggtt

SEQ ID NO: 33580 - DNA, 28 bp, Artificial Sequence
  Probe
gtttttcatatcattggtcgtggttgta

SEQ ID NO: 33581 - DNA, 31 bp, Artificial Sequence; identical to SEQ ID NO: 23173
  Probe

SEQ ID NO: 33582 - DNA, 33 bp, Artificial Sequence
  Probe
gtttttcatatcattggtcgtggttgtagtccg

SEQ ID NO: 33583 - DNA, 34 bp, Artificial Sequence
  Probe
gtttttcatatcattggtcgtggttgtagtccgt

SEQ ID NO: 33584 - DNA, 35 bp, Artificial Sequence
  Probe
gtttttcatatcattggtcgtggttgtagtccgtg

SEQ ID NO: 33585 - DNA, 40 bp, Artificial Sequence
  Probe
gtttttcatatcattggtcgtggttgtagtccgtgcgaga

SEQ ID NO: 33586 - DNA, 41 bp, Artificial Sequence
  Probe
gtttttcatatcattggtcgtggttgtagtccgtgcgagaa

SEQ ID NO: 33587 - DNA, 43 bp, Artificial Sequence; identical to SEQ ID NO: 7306
  Probe

SEQ ID NO: 33588 - DNA, 45 bp, Artificial Sequence
  Probe
gtttttcatatcattggtcgtggttgtagtccgtgcgagaataat

SEQ ID NO: 33589 - DNA, 29 bp, Artificial Sequence
  Probe
taaaacttaaaactttacagtcagaggtt

SEQ ID NO: 33590 - DNA, 30 bp, Artificial Sequence
  Probe
taaaacttaaaactttacagtcagaggttc

SEQ ID NO: 33591 - DNA, 36 bp, Artificial Sequence
  Probe
taaaacttaaaactttacagtcagaggttcaattcc

SEQ ID NO: 33592 - DNA, 27 bp, Artificial Sequence
  Probe
taaaatggctgagtgaagcattggact

SEQ ID NO: 33593 - DNA, 26 bp, Artificial Sequence
  Probe
taaacaaaacgaatgatttcgactca

SEQ ID NO: 33594 - DNA, 36 bp, Artificial Sequence
  Probe
taaacaggagatcctgggttcgaatcccagcggggc

SEQ ID NO: 33595 - DNA, 36 bp, Artificial Sequence
  Probe
taaacaggagatcctgggttcgaatcccagcggtgc

SEQ ID NO: 33596 - DNA, 19 bp, Artificial Sequence
  Probe
taaaccaggggtcgcgagt

SEQ ID NO: 33597 - DNA, 36 bp, Artificial Sequence
  Probe
taaacccccttatttctaggactatgagaatcgaac

SEQ ID NO: 33598 - DNA, 37 bp, Artificial Sequence
  Probe
taaacccccttatttctaggactatgagaatcgaacc

SEQ ID NO: 33599 - DNA, 19 bp, Artificial Sequence
  Probe
taaaccgaagatcgcgggt

SEQ ID NO: 33600 - DNA, 18 bp, Artificial Sequence
  Probe
taaaccggagatgaaaac

SEQ ID NO: 33601 - DNA, 19 bp, Artificial Sequence
  Probe
taaaccggagatgaaaacc

SEQ ID NO: 33602 - DNA, 20 bp, Artificial Sequence
  Probe
taaaccggagatgaaaacct

SEQ ID NO: 33603 - DNA, 18 bp, Artificial Sequence
  Probe
taaacctagccccaaacc

SEQ ID NO: 33604 - DNA, 27 bp, Artificial Sequence
  Probe
taaacctagccccaaacccactccacc

SEQ ID NO: 33605 - DNA, 28 bp, Artificial Sequence
  Probe
taaacctagccccaaacccactccacct

SEQ ID NO: 33606 - DNA, 29 bp, Artificial Sequence
  Probe
taaacttcgccttaattttaataatcaac

SEQ ID NO: 33607 - DNA, 21 bp, Artificial Sequence
  Probe
taaagacaggggttaggcctc

SEQ ID NO: 33608 - DNA, 29 bp, Artificial Sequence
  Probe
taaagacaggggttaggcctctttttacc

SEQ ID NO: 33609 - DNA, 32 bp, Artificial Sequence; identical to SEQ ID NO: 23197
  Probe

SEQ ID NO: 33610 - DNA, 16 bp, Artificial Sequence
  Probe
taaagattaagagaac

SEQ ID NO: 33611 - DNA, 17 bp, Artificial Sequence
  Probe
taaagattaagagaacc

SEQ ID NO: 33612 - DNA, 18 bp, Artificial Sequence
  Probe
taaagattaagagaacca

SEQ ID NO: 33613 - DNA, 20 bp, Artificial Sequence
  Probe
taaagattaagagaaccaac

SEQ ID NO: 33614 - DNA, 21 bp, Artificial Sequence
  Probe
taaagattaagagaaccaaca

SEQ ID NO: 33615 - DNA, 22 bp, Artificial Sequence
  Probe
taaagattaagagaaccaacac

SEQ ID NO: 33616 - DNA, 23 bp, Artificial Sequence
  Probe
taaagattaagagaaccaacacc

SEQ ID NO: 33617 - DNA, 24 bp, Artificial Sequence
  Probe
taaagattaagagaaccaacacct

SEQ ID NO: 33618 - DNA, 25 bp, Artificial Sequence
  Probe
taaagattaagagaaccaacacctc

SEQ ID NO: 33619 - DNA, 26 bp, Artificial Sequence
  Probe
taaagattaagagaaccaacacctct

SEQ ID NO: 33620 - DNA, 32 bp, Artificial Sequence
  Probe
taaagattaagagaaccaacacctctttacag

SEQ ID NO: 33621 - DNA, 36 bp, Artificial Sequence; identical to SEQ ID NO: 23202
  Probe

SEQ ID NO: 33622 - DNA, 25 bp, Artificial Sequence
  Probe
taaaggataacagctatccattggt

SEQ ID NO: 33623 - DNA, 27 bp, Artificial Sequence
  Probe
taaaggataacagctatccattggtct

SEQ ID NO: 33624 - DNA, 28 bp, Artificial Sequence
  Probe
taaaggataacagctatccattggtctt

SEQ ID NO: 33625 - DNA, 29 bp, Artificial Sequence
  Probe
taaaggataacagctatccattggtctta

SEQ ID NO: 33626 - DNA, 30 bp, Artificial Sequence
  Probe
taaaggataacagctatccattggtcttag

SEQ ID NO: 33627 - DNA, 33 bp, Artificial Sequence
  Probe
taaaggataacagctatccattggtcttaggcc

SEQ ID NO: 33628 - DNA, 34 bp, Artificial Sequence
  Probe
taaaggataacagctatccattggtcttaggccc

SEQ ID NO: 33629 - DNA, 35 bp, Artificial Sequence
  Probe
taaaggataacagctatccattggtcttaggcccc

SEQ ID NO: 33630 - DNA, 36 bp, Artificial Sequence
  Probe
taaaggataacagctatccattggtcttaggcccca

SEQ ID NO: 33631 - DNA, 17 bp, Artificial Sequence
  Probe
taaagtggctgatttgc

SEQ ID NO: 33632 - DNA, 16 bp, Artificial Sequence
  Probe
taaataagctatcggg

SEQ ID NO: 33633 - DNA, 17 bp, Artificial Sequence
  Probe
taaataagctatcgggc

SEQ ID NO: 33634 - DNA, 18 bp, Artificial Sequence
  Probe
taaataagctatcgggcc

SEQ ID NO: 33635 - DNA, 19 bp, Artificial Sequence
  Probe
taaataagctatcgggccc

SEQ ID NO: 33636 - DNA, 20 bp, Artificial Sequence
  Probe
taaataagctatcgggccca

SEQ ID NO: 33637 - DNA, 21 bp, Artificial Sequence
  Probe
taaataagctatcgggcccat

SEQ ID NO: 33638 - DNA, 24 bp, Artificial Sequence
  Probe
taaataagctatcgggcccatacc

SEQ ID NO: 33639 - DNA, 25 bp, Artificial Sequence
  Probe
taaataagctatcgggcccataccc

SEQ ID NO: 33640 - DNA, 36 bp, Artificial Sequence
  Probe
taaataagctatcgggcccataccccgaaaatgttg

SEQ ID NO: 33641 - DNA, 15 bp, Artificial Sequence
  Probe
taaataataggagct

SEQ ID NO: 33642 - DNA, 16 bp, Artificial Sequence
  Probe
taaataataggagctt

SEQ ID NO: 33643 - DNA, 21 bp, Artificial Sequence
  Probe
taaataataggagcttaaacc

SEQ ID NO: 33644 - DNA, 18 bp, Artificial Sequence
  Probe
taaatacagaccaagagc

SEQ ID NO: 33645 - DNA, 22 bp, Artificial Sequence
  Probe
taaatacagaccaagagccttc

SEQ ID NO: 33646 - DNA, 23 bp, Artificial Sequence
  Probe
taaatacagaccaagagccttca

SEQ ID NO: 33647 - DNA, 26 bp, Artificial Sequence
  Probe
taaatacagaccaagagccttcaaag

SEQ ID NO: 33648 - DNA, 28 bp, Artificial Sequence
  Probe
taaatacagaccaagagccttcaaagcc

SEQ ID NO: 33649 - DNA, 32 bp, Artificial Sequence
  Probe
taaatacagaccaagagccttcaaagccctca

SEQ ID NO: 33650 - DNA, 36 bp, Artificial Sequence
  Probe
taaatacagaccaagagccttcaaagccctcagtaa

SEQ ID NO: 33651 - DNA, 18 bp, Artificial Sequence
  Probe
taaatactaccgtatggc

SEQ ID NO: 33652 - DNA, 17 bp, Artificial Sequence
  Probe
taaatagtaccgttaac

SEQ ID NO: 33653 - DNA, 18 bp, Artificial Sequence
  Probe
taaatagtaccgttaact

SEQ ID NO: 33654 - DNA, 20 bp, Artificial Sequence
  Probe
taaatagtaccgttaacttc

SEQ ID NO: 33655 - DNA, 21 bp, Artificial Sequence
  Probe
taaatagtaccgttaacttcc

SEQ ID NO: 33656 - DNA, 36 bp, Artificial Sequence
  Probe
taaatagtaccgttaacttccaattaactagttttg

SEQ ID NO: 33657 - DNA, 36 bp, Artificial Sequence
  Probe
taaatctaaagacaggggttaggcctctttttacca

SEQ ID NO: 33658 - DNA, 18 bp, Artificial Sequence
  Probe
taaattagaatcttagct

SEQ ID NO: 33659 - DNA, 21 bp, Artificial Sequence
  Probe
taaattagaatcttagctttg

SEQ ID NO: 33660 - DNA, 22 bp, Artificial Sequence
  Probe
taaattagaatcttagctttgg

SEQ ID NO: 33661 - DNA, 27 bp, Artificial Sequence
  Probe
taaattagaatcttagctttgggtgct

SEQ ID NO: 33662 - DNA, 46 bp, Artificial Sequence
  Probe
taaattagaatcttagctttgggtgctaatggtggagttaaagact

SEQ ID NO: 33663 - DNA, 50 bp, Artificial Sequence; identical to SEQ ID NO: 1567
  Probe

SEQ ID NO: 33664 - DNA, 18 bp, Artificial Sequence
  Probe
taacaacatggctttctc

SEQ ID NO: 33665 - DNA, 21 bp, Artificial Sequence
  Probe
taacaacatggctttctcaac

SEQ ID NO: 33666 - DNA, 15 bp, Artificial Sequence
  Probe
taacacaaagcaccc

SEQ ID NO: 33667 - DNA, 16 bp, Artificial Sequence
  Probe
taacacaaagcaccca

SEQ ID NO: 33668 - DNA, 23 bp, Artificial Sequence
  Probe
taacacaaagcacccaacttaca

SEQ ID NO: 33669 - DNA, 25 bp, Artificial Sequence
  Probe
taacacaaagcacccaacttacact

SEQ ID NO: 33670 - DNA, 30 bp, Artificial Sequence; identical to SEQ ID NO: 7355
  Probe

SEQ ID NO: 33671 - DNA, 32 bp, Artificial Sequence; identical to SEQ ID NO: 7356
  Probe

SEQ ID NO: 33672 - DNA, 33 bp, Artificial Sequence; identical to SEQ ID NO: 23226
  Probe

SEQ ID NO: 33673 - DNA, 36 bp, Artificial Sequence
  Probe
taacacaaagcacccaacttacacttaggagatttc

SEQ ID NO: 33674 - DNA, 40 bp, Artificial Sequence
  Probe
taacacaaagcacccaacttacacttaggagatttcaact

SEQ ID NO: 33675 - DNA, 50 bp, Artificial Sequence; identical to SEQ ID NO: 1568
  Probe

SEQ ID NO: 33676 - DNA, 15 bp, Artificial Sequence
  Probe
taacagctaaggact

SEQ ID NO: 33677 - DNA, 17 bp, Artificial Sequence
  Probe
taacagctaaggactgc

SEQ ID NO: 33678 - DNA, 23 bp, Artificial Sequence
  Probe
taacagctaaggactgcaaaacc

SEQ ID NO: 33679 - DNA, 24 bp, Artificial Sequence
  Probe
taacagctaaggactgcaaaaccc

SEQ ID NO: 33680 - DNA, 25 bp, Artificial Sequence
  Probe
taacagctaaggactgcaaaacccc

SEQ ID NO: 33681 - DNA, 26 bp, Artificial Sequence
  Probe
taacagctaaggactgcaaaacccca

SEQ ID NO: 33682 - DNA, 27 bp, Artificial Sequence
  Probe
taacagctaaggactgcaaaaccccac

SEQ ID NO: 33683 - DNA, 28 bp, Artificial Sequence
  Probe
taacagctaaggactgcaaaaccccact

SEQ ID NO: 33684 - DNA, 29 bp, Artificial Sequence
  Probe
taacagctaaggactgcaaaaccccactc

SEQ ID NO: 33685 - DNA, 30 bp, Artificial Sequence; identical to SEQ ID NO: 11605
  Probe

SEQ ID NO: 33686 - DNA, 18 bp, Artificial Sequence
  Probe
taacagctatccattggt

SEQ ID NO: 33687 - DNA, 22 bp, Artificial Sequence
  Probe
taacagctatccattggtctta

SEQ ID NO: 33688 - DNA, 27 bp, Artificial Sequence
  Probe
taacagctatccattggtcttaggccc

SEQ ID NO: 33689 - DNA, 28 bp, Artificial Sequence
  Probe
taacagctatccattggtcttaggcccc

SEQ ID NO: 33690 - DNA, 36 bp, Artificial Sequence
  Probe
taacagctatccattggtcttaggccccaaaaattt

SEQ ID NO: 33691 - DNA, 20 bp, Artificial Sequence
  Probe
taaccaaaacatcagattgt

SEQ ID NO: 33692 - DNA, 22 bp, Artificial Sequence
  Probe
taaccaaaacatcagattgtga

SEQ ID NO: 33693 - DNA, 25 bp, Artificial Sequence
  Probe
taaccaaaacatcagattgtgaatc

SEQ ID NO: 33694 - DNA, 26 bp, Artificial Sequence
  Probe
taaccaaaacatcagattgtgaatct

SEQ ID NO: 33695 - DNA, 33 bp, Artificial Sequence; identical to SEQ ID NO: 7368
  Probe

SEQ ID NO: 33696 - DNA, 36 bp, Artificial Sequence; identical to SEQ ID NO: 23251
  Probe

SEQ ID NO: 33697 - DNA, 39 bp, Artificial Sequence; identical to SEQ ID NO: 7371
  Probe

SEQ ID NO: 33698 - DNA, 50 bp, Artificial Sequence; identical to SEQ ID NO: 1569
  Probe

SEQ ID NO: 33699 - DNA, 29 bp, Artificial Sequence
  Probe
taaccatgcacactactataaccacccta

SEQ ID NO: 33700 - DNA, 21 bp, Artificial Sequence
  Probe
taacccagaggtcgatggatc

SEQ ID NO: 33701 - DNA, 22 bp, Artificial Sequence
  Probe
taacccagaggtcgatggatcg

SEQ ID NO: 33702 - DNA, 23 bp, Artificial Sequence
  Probe
taacccagaggtcgatggatcga

SEQ ID NO: 33703 - DNA, 41 bp, Artificial Sequence; identical to SEQ ID NO: 7378
  Probe

SEQ ID NO: 33704 - DNA, 41 bp, Artificial Sequence
  Probe
taaccgaaaggttggtggttcgagcccacccagggacgcta

SEQ ID NO: 33705 - DNA, 30 bp, Artificial Sequence; identical to SEQ ID NO: 23258
  Probe

SEQ ID NO: 33706 - DNA, 36 bp, Artificial Sequence
  Probe
taaccttttaagttaaagattaagagaaccaacacc

SEQ ID NO: 33707 - DNA, 21 bp, Artificial Sequence
  Probe
taactaagtgtttgtgggttt

SEQ ID NO: 33708 - DNA, 36 bp, Artificial Sequence; identical to SEQ ID NO: 23261
  Probe

SEQ ID NO: 33709 - DNA, 17 bp, Artificial Sequence
  Probe
taactagttttgacaac

SEQ ID NO: 33710 - DNA, 24 bp, Artificial Sequence
  Probe
taactcatgcccccatgtctaaca

SEQ ID NO: 33711 - DNA, 36 bp, Artificial Sequence; identical to SEQ ID NO: 7391
  Probe

SEQ ID NO: 33712 - DNA, 41 bp, Artificial Sequence; identical to SEQ ID NO: 7396
  Probe

SEQ ID NO: 33713 - DNA, 36 bp, Artificial Sequence
  Probe
taacttagcattaaccttttaagttaaagattaaga

SEQ ID NO: 33714 - DNA, 25 bp, Artificial Sequence
  Probe
taacttccaattaactagttttgac

SEQ ID NO: 33715 - DNA, 15 bp, Artificial Sequence
  Probe
taacttgaccgctct

SEQ ID NO: 33716 - DNA, 16 bp, Artificial Sequence
  Probe
taacttgaccgctctg

SEQ ID NO: 33717 - DNA, 17 bp, Artificial Sequence
  Probe
taacttgaccgctctga

SEQ ID NO: 33718 - DNA, 18 bp, Artificial Sequence
  Probe
taacttgaccgctctgag

SEQ ID NO: 33719 - DNA, 19 bp, Artificial Sequence
  Probe
taacttgaccgctctgagc

SEQ ID NO: 33720 - DNA, 20 bp, Artificial Sequence
  Probe
taacttgaccgctctgagct

SEQ ID NO: 33721 - DNA, 25 bp, Artificial Sequence
  Probe
taacttgaccgctctgagctaaacc

SEQ ID NO: 33722 - DNA, 26 bp, Artificial Sequence
  Probe
taacttgaccgctctgagctaaacct

SEQ ID NO: 33723 - DNA, 30 bp, Artificial Sequence
  Probe
taacttgaccgctctgagctaaacctagcc

SEQ ID NO: 33724 - DNA, 31 bp, Artificial Sequence
  Probe
taacttgaccgctctgagctaaacctagccc

SEQ ID NO: 33725 - DNA, 32 bp, Artificial Sequence
  Probe
taacttgaccgctctgagctaaacctagcccc

SEQ ID NO: 33726 - DNA, 33 bp, Artificial Sequence
  Probe
taacttgaccgctctgagctaaacctagcccca

SEQ ID NO: 33727 - DNA, 36 bp, Artificial Sequence
  Probe
taacttgaccgctctgagctaaacctagccccaaac

SEQ ID NO: 33728 - DNA, 28 bp, Artificial Sequence
  Probe
taactttgtcaaagttaaattataggct

SEQ ID NO: 33729 - DNA, 15 bp, Artificial Sequence
  Probe
taagagaaccaacac

SEQ ID NO: 33730 - DNA, 16 bp, Artificial Sequence
  Probe
taagagaaccaacacc

SEQ ID NO: 33731 - DNA, 17 bp, Artificial Sequence
  Probe
taagagaaccaacacct

SEQ ID NO: 33732 - DNA, 29 bp, Artificial Sequence
  Probe
taagagaaccaacacctctttacagtgaa

SEQ ID NO: 33733 - DNA, 15 bp, Artificial Sequence
  Probe
taagatggcagagcc

SEQ ID NO: 33734 - DNA, 16 bp, Artificial Sequence
  Probe
taagatggcagagccc

SEQ ID NO: 33735 - DNA, 17 bp, Artificial Sequence
  Probe
taagatggcagagcccg

SEQ ID NO: 33736 - DNA, 28 bp, Artificial Sequence
  Probe
taagatggcagagcccggtaatcgcata

SEQ ID NO: 33737 - DNA, 30 bp, Artificial Sequence
  Probe
taagatggcagagcccggtaatcgcataaa

SEQ ID NO: 33738 - DNA, 40 bp, Artificial Sequence
  Probe
taagatggcagagcccggtaatcgcataaaacttaaaact

SEQ ID NO: 33739 - DNA, 21 bp, Artificial Sequence
  Probe
taagcaccttgcctgcgggct

SEQ ID NO: 33740 - DNA, 36 bp, Artificial Sequence
  Probe
taagcattggtggttcagtggtagaattctcgcctg

SEQ ID NO: 33741 - DNA, 19 bp, Artificial Sequence
  Probe
taagccagggattgtgggt

SEQ ID NO: 33742 - DNA, 36 bp, Artificial Sequence
  Probe
taagccagggattgtgggttcgagtcccacccgggg

SEQ ID NO: 33743 - DNA, 36 bp, Artificial Sequence
  Probe
taagccagggattgtgggttcgagtcccacctgggg

SEQ ID NO: 33744 - DNA, 36 bp, Artificial Sequence
  Probe
taagccagggattgtgggttcgagtcccatctgggg

SEQ ID NO: 33745 - DNA, 40 bp, Artificial Sequence; identical to SEQ ID NO: 7410
  Probe

SEQ ID NO: 33746 - DNA, 41 bp, Artificial Sequence; identical to SEQ ID NO: 7411
  Probe

SEQ ID NO: 33747 - DNA, 15 bp, Artificial Sequence
  Probe
taagctatcgggccc

SEQ ID NO: 33748 - DNA, 16 bp, Artificial Sequence
  Probe
taagctatcgggccca

SEQ ID NO: 33749 - DNA, 17 bp, Artificial Sequence
  Probe
taagctatcgggcccat

SEQ ID NO: 33750 - DNA, 20 bp, Artificial Sequence
  Probe
taagctatcgggcccatacc

SEQ ID NO: 33751 - DNA, 36 bp, Artificial Sequence; identical to SEQ ID NO: 7429
  Probe

SEQ ID NO: 33752 - DNA, 16 bp, Artificial Sequence
  Probe
taaggactgcaaaacc

SEQ ID NO: 33753 - DNA, 17 bp, Artificial Sequence
  Probe
taaggactgcaaaaccc

SEQ ID NO: 33754 - DNA, 21 bp, Artificial Sequence
  Probe
taaggactgcaaaaccccact

SEQ ID NO: 33755 - DNA, 23 bp, Artificial Sequence
  Probe
taaggactgcaaaaccccactct

SEQ ID NO: 33756 - DNA, 36 bp, Artificial Sequence
  Probe
taaggcattggcctcctaagccagggattgtgggtt

SEQ ID NO: 33757 - DNA, 15 bp, Artificial Sequence
  Probe
taaggcggctgtttt

SEQ ID NO: 33758 - DNA, 15 bp, Artificial Sequence
  Probe
taaggtcagctaaat

SEQ ID NO: 33759 - DNA, 18 bp, Artificial Sequence
  Probe
taaggtcagctaaataag

SEQ ID NO: 33760 - DNA, 27 bp, Artificial Sequence
  Probe
taaggtcagctaaataagctatcgggc

SEQ ID NO: 33761 - DNA, 28 bp, Artificial Sequence
  Probe
taaggtcagctaaataagctatcgggcc

SEQ ID NO: 33762 - DNA, 29 bp, Artificial Sequence
  Probe
taaggtcagctaaataagctatcgggccc

SEQ ID NO: 33763 - DNA, 30 bp, Artificial Sequence; identical to SEQ ID NO: 7439
  Probe

SEQ ID NO: 33764 - DNA, 31 bp, Artificial Sequence; identical to SEQ ID NO: 7440
  Probe

SEQ ID NO: 33765 - DNA, 36 bp, Artificial Sequence; identical to SEQ ID NO: 23320
  Probe

SEQ ID NO: 33766 - DNA, 15 bp, Artificial Sequence
  Probe
taagtcccattggtc

SEQ ID NO: 33767 - DNA, 16 bp, Artificial Sequence
  Probe
taagtgtttgtgggtt

SEQ ID NO: 33768 - DNA, 17 bp, Artificial Sequence
  Probe
taagtgtttgtgggttt

SEQ ID NO: 33769 - DNA, 22 bp, Artificial Sequence
  Probe
taagtgtttgtgggtttaagtc

SEQ ID NO: 33770 - DNA, 23 bp, Artificial Sequence
  Probe
taagtgtttgtgggtttaagtcc

SEQ ID NO: 33771 - DNA, 31 bp, Artificial Sequence; identical to SEQ ID NO: 7456
  Probe

SEQ ID NO: 33772 - DNA, 22 bp, Artificial Sequence
  Probe
taagttaaagattaagagaacc

SEQ ID NO: 33773 - DNA, 27 bp, Artificial Sequence
  Probe
taagttaaagattaagagaaccaacac

SEQ ID NO: 33774 - DNA, 28 bp, Artificial Sequence
  Probe
taagttaaagattaagagaaccaacacc

SEQ ID NO: 33775 - DNA, 29 bp, Artificial Sequence
  Probe
taagttaaagattaagagaaccaacacct

SEQ ID NO: 33776 - DNA, 36 bp, Artificial Sequence
  Probe
taagttaaagattaagagaaccaacacctctttaca

SEQ ID NO: 33777 - DNA, 16 bp, Artificial Sequence
  Probe
taataacgccaaggtc

SEQ ID NO: 33778 - DNA, 22 bp, Artificial Sequence
  Probe
taataacgccaaggtcgcgggt

SEQ ID NO: 33779 - DNA, 23 bp, Artificial Sequence
  Probe
taataacgccaaggtcgcgggtt

SEQ ID NO: 33780 - DNA, 17 bp, Artificial Sequence
  Probe
taataggagcttaaacc

SEQ ID NO: 33781 - DNA, 19 bp, Artificial Sequence
  Probe
taataggagcttaaacccc

SEQ ID NO: 33782 - DNA, 18 bp, Artificial Sequence
  Probe
taatcccctggcccaacc

SEQ ID NO: 33783 - DNA, 19 bp, Artificial Sequence
  Probe
taatcccctggcccaaccc

SEQ ID NO: 33784 - DNA, 28 bp, Artificial Sequence
  Probe
taatcccctggcccaacccgtcatctac

SEQ ID NO: 33785 - DNA, 36 bp, Artificial Sequence
  Probe
taatctcagggtcgtgggttcgagccccacgttggg

SEQ ID NO: 33786 - DNA, 41 bp, Artificial Sequence
  Probe
taatctcagggtcgtgggttcgagccccacgttgggcggca

SEQ ID NO: 33787 - DNA, 15 bp, Artificial Sequence
  Probe
taatctgaaggtcct

SEQ ID NO: 33788 - DNA, 19 bp, Artificial Sequence
  Probe
taatctgaaggtcctgagt

SEQ ID NO: 33789 - DNA, 36 bp, Artificial Sequence
  Probe
taatctgaaggtcctgagttcgaacctcagaggggg

SEQ ID NO: 33790 - DNA, 41 bp, Artificial Sequence
  Probe
taatctgaaggtcctgagttcgaacctcagagggggcagct

SEQ ID NO: 33791 - DNA, 36 bp, Artificial Sequence
  Probe
taatctgaaggtcctgagttcgagcctcagagaggg

SEQ ID NO: 33792 - DNA, 38 bp, Artificial Sequence
  Probe
taatctgaaggtcgtgagttcgagcctcacacggggca

SEQ ID NO: 33793 - DNA, 36 bp, Artificial Sequence
  Probe
taatctgaaggtcgtgagttcgatcctcacacgggg

SEQ ID NO: 33794 - DNA, 40 bp, Artificial Sequence
  Probe
taatctgaaggtcgtgagttcgatcctcacacggggcaca

SEQ ID NO: 33795 - DNA, 41 bp, Artificial Sequence; identical to SEQ ID NO: 7465
  Probe

SEQ ID NO: 33796 - DNA, 36 bp, Artificial Sequence
  Probe
taatctgagggtccagggttcaagtccctgttcggg

SEQ ID NO: 33797 - DNA, 40 bp, Artificial Sequence
  Probe
taatctgagggtccagggttcaagtccctgttcgggcggc

SEQ ID NO: 33798 - DNA, 41 bp, Artificial Sequence
  Probe
taatctgagggtccagggttcaagtccctgttcgggcggca

SEQ ID NO: 33799 - DNA, 40 bp, Artificial Sequence
  Probe
taatctgagggtccagggttcaagtccctgttcgggcgtc

SEQ ID NO: 33800 - DNA, 15 bp, Artificial Sequence
  Probe
taatggataaggcac

SEQ ID NO: 33801 - DNA, 16 bp, Artificial Sequence
  Probe
taatggataaggcact

SEQ ID NO: 33802 - DNA, 17 bp, Artificial Sequence
  Probe
taatggataaggcactg

SEQ ID NO: 33803 - DNA, 19 bp, Artificial Sequence
  Probe
taatggataaggcactggc

SEQ ID NO: 33804 - DNA, 16 bp, Artificial Sequence
  Probe
taatggataaggcatt

SEQ ID NO: 33805 - DNA, 17 bp, Artificial Sequence
  Probe
taatggataaggcattg

SEQ ID NO: 33806 - DNA, 21 bp, Artificial Sequence
  Probe
taatggataaggcgtctgact

SEQ ID NO: 33807 - DNA, 32 bp, Artificial Sequence
  Probe
taatggcacatgcagcgcaagtaggtctacaa

SEQ ID NO: 33808 - DNA, 19 bp, Artificial Sequence
  Probe
taatggtggagttaaagac

SEQ ID NO: 33809 - DNA, 20 bp, Artificial Sequence
  Probe
taatggtggagttaaagact

SEQ ID NO: 33810 - DNA, 31 bp, Artificial Sequence
  Probe
taatggtggagttaaagactttttctctgat

SEQ ID NO: 33811 - DNA, 17 bp, Artificial Sequence
  Probe
taatggttagcactctg

SEQ ID NO: 33812 - DNA, 18 bp, Artificial Sequence
  Probe
taatggttagcactctgg

SEQ ID NO: 33813 - DNA, 19 bp, Artificial Sequence
  Probe
taatggttagcactctgga

SEQ ID NO: 33814 - DNA, 21 bp, Artificial Sequence
  Probe
taatggttagcactctggact

SEQ ID NO: 33815 - DNA, 22 bp, Artificial Sequence
  Probe
taatggttagcactctggactc

SEQ ID NO: 33816 - DNA, 26 bp, Artificial Sequence
  Probe
taatggttagcactctggactctgaa

SEQ ID NO: 33817 - DNA, 27 bp, Artificial Sequence
  Probe
taatggttagcactctggactctgaat

SEQ ID NO: 33818 - DNA, 28 bp, Artificial Sequence
  Probe
taatggttagcactctggactctgaatc

SEQ ID NO: 33819 - DNA, 30 bp, Artificial Sequence
  Probe
taatggttagcactctggactctgaatcca

SEQ ID NO: 33820 - DNA, 40 bp, Artificial Sequence
  Probe
taatggttagcactctggactctgaatccagcgatccgag

SEQ ID NO: 33821 - DNA, 41 bp, Artificial Sequence
  Probe
taatggttagcactctggactctgaatccagcgatccgagt

SEQ ID NO: 33822 - DNA, 42 bp, Artificial Sequence
  Probe
taatggttagcactctggactctgaatccagcgatccgagtt

SEQ ID NO: 33823 - DNA, 36 bp, Artificial Sequence
  Probe
taatggttagcactctggactttgaatccagcgatc

SEQ ID NO: 33824 - DNA, 42 bp, Artificial Sequence
  Probe
taatggttagcactctggactttgaatccagcgatccgagtt

SEQ ID NO: 33825 - DNA, 17 bp, Artificial Sequence
  Probe
taattaaagtggctgat

SEQ ID NO: 33826 - DNA, 18 bp, Artificial Sequence
  Probe
taattaaagtggctgatt

SEQ ID NO: 33827 - DNA, 21 bp, Artificial Sequence
  Probe
taattaaagtggctgatttgc

SEQ ID NO: 33828 - DNA, 19 bp, Artificial Sequence
  Probe
taattgaaaacaaaatact

SEQ ID NO: 33829 - DNA, 29 bp, Artificial Sequence
  Probe
taattgaaaacaaaatactcaaatgggcc

SEQ ID NO: 33830 - DNA, 30 bp, Artificial Sequence; identical to SEQ ID NO: 7468
  Probe

SEQ ID NO: 33831 - DNA, 17 bp, Artificial Sequence
  Probe
taattttaataatcaac

SEQ ID NO: 33832 - DNA, 23 bp, Artificial Sequence
  Probe
tacaaaaaggattagactgaacc

SEQ ID NO: 33833 - DNA, 36 bp, Artificial Sequence
  Probe
tacaacgatggtttttcatatcattggtcgtggttg

SEQ ID NO: 33834 - DNA, 41 bp, Artificial Sequence
  Probe
tacaacgatggtttttcatatcattggtcgtggttgtagtc

SEQ ID NO: 33835 - DNA, 42 bp, Artificial Sequence
  Probe
tacaacgatggtttttcatatcattggtcgtggttgtagtcc

SEQ ID NO: 33836 - DNA, 50 bp, Artificial Sequence; identical to SEQ ID NO: 1574
  Probe

SEQ ID NO: 33837 - DNA, 15 bp, Artificial Sequence
  Probe
tacaatctccagcat

SEQ ID NO: 33838 - DNA, 16 bp, Artificial Sequence
  Probe
tacaatctccagcatt

SEQ ID NO: 33839 - DNA, 17 bp, Artificial Sequence
  Probe
tacaatctccagcattc

SEQ ID NO: 33840 - DNA, 18 bp, Artificial Sequence
  Probe
tacaatctccagcattcc

SEQ ID NO: 33841 - DNA, 19 bp, Artificial Sequence
  Probe
tacaatctccagcattccc

SEQ ID NO: 33842 - DNA, 20 bp, Artificial Sequence
  Probe
tacaatctccagcattcccc

SEQ ID NO: 33843 - DNA, 21 bp, Artificial Sequence
  Probe
tacaatctccagcattccccc

SEQ ID NO: 33844 - DNA, 22 bp, Artificial Sequence
  Probe
tacaatctccagcattccccct

SEQ ID NO: 33845 - DNA, 23 bp, Artificial Sequence
  Probe
tacaatctccagcattccccctc

SEQ ID NO: 33846 - DNA, 24 bp, Artificial Sequence
  Probe
tacaatctccagcattccccctca

SEQ ID NO: 33847 - DNA, 27 bp, Artificial Sequence
  Probe
tacaatctccagcattccccctcaaac

SEQ ID NO: 33848 - DNA, 28 bp, Artificial Sequence
  Probe
tacaatctccagcattccccctcaaacc

SEQ ID NO: 33849 - DNA, 29 bp, Artificial Sequence
  Probe
tacaatctccagcattccccctcaaacct

SEQ ID NO: 33850 - DNA, 30 bp, Artificial Sequence; identical to SEQ ID NO: 7478
  Probe

SEQ ID NO: 33851 - DNA, 33 bp, Artificial Sequence; identical to SEQ ID NO: 7481
  Probe

SEQ ID NO: 33852 - DNA, 34 bp, Artificial Sequence
  Probe
tacaatctccagcattccccctcaaacctaagaa

SEQ ID NO: 33853 - DNA, 18 bp, Artificial Sequence
  Probe
tacacgcagaaggtcctg

SEQ ID NO: 33854 - DNA, 26 bp, Artificial Sequence
  Probe
tacactgaaaatgtttagacgggctc

SEQ ID NO: 33855 - DNA, 20 bp, Artificial Sequence
  Probe
tacacttaggagatttcaac

SEQ ID NO: 33856 - DNA, 21 bp, Artificial Sequence
  Probe
tacacttaggagatttcaact

SEQ ID NO: 33857 - DNA, 22 bp, Artificial Sequence
  Probe
tacacttaggagatttcaactt

SEQ ID NO: 33858 - DNA, 26 bp, Artificial Sequence
  Probe
tacacttaggagatttcaacttaact

SEQ ID NO: 33859 - DNA, 31 bp, Artificial Sequence; identical to SEQ ID NO: 23360
  Probe

SEQ ID NO: 33860 - DNA, 32 bp, Artificial Sequence; identical to SEQ ID NO: 7488
  Probe

SEQ ID NO: 33861 - DNA, 34 bp, Artificial Sequence; identical to SEQ ID NO: 7490
  Probe

SEQ ID NO: 33862 - DNA, 35 bp, Artificial Sequence; identical to SEQ ID NO: 7491
  Probe

SEQ ID NO: 33863 - DNA, 36 bp, Artificial Sequence; identical to SEQ ID NO: 7492
  Probe

SEQ ID NO: 33864 - DNA, 40 bp, Artificial Sequence; identical to SEQ ID NO: 7496
  Probe

SEQ ID NO: 33865 - DNA, 41 bp, Artificial Sequence; identical to SEQ ID NO: 7497
  Probe

SEQ ID NO: 33866 - DNA, 15 bp, Artificial Sequence
  Probe
tacagaccaagagcc

SEQ ID NO: 33867 - DNA, 16 bp, Artificial Sequence
  Probe
tacagaccaagagcct

SEQ ID NO: 33868 - DNA, 24 bp, Artificial Sequence
  Probe
tacagaccaagagccttcaaagcc

SEQ ID NO: 33869 - DNA, 15 bp, Artificial Sequence
  Probe
tacagtcagaggttc

SEQ ID NO: 33870 - DNA, 20 bp, Artificial Sequence
  Probe
tacagtcagaggttcaattc

SEQ ID NO: 33871 - DNA, 21 bp, Artificial Sequence
  Probe
tacagtcagaggttcaattcc

SEQ ID NO: 33872 - DNA, 36 bp, Artificial Sequence
  Probe
tacagtggctcgttggtctaggggtatgattctcgc

SEQ ID NO: 33873 - DNA, 15 bp, Artificial Sequence
  Probe
tacccacacccaccc

SEQ ID NO: 33874 - DNA, 32 bp, Artificial Sequence; identical to SEQ ID NO: 7512
  Probe

SEQ ID NO: 33875 - DNA, 15 bp, Artificial Sequence
  Probe
tacccatggccaacc

SEQ ID NO: 33876 - DNA, 16 bp, Artificial Sequence
  Probe
tacccatggccaacct

SEQ ID NO: 33877 - DNA, 18 bp, Artificial Sequence
  Probe
tacccatggccaacctcc

SEQ ID NO: 33878 - DNA, 19 bp, Artificial Sequence
  Probe
tacccatggccaacctcct

SEQ ID NO: 33879 - DNA, 22 bp, Artificial Sequence
  Probe
tacccatggccaacctcctact

SEQ ID NO: 33880 - DNA, 23 bp, Artificial Sequence
  Probe
tacccatggccaacctcctactc

SEQ ID NO: 33881 - DNA, 24 bp, Artificial Sequence
  Probe
tacccatggccaacctcctactcc

SEQ ID NO: 33882 - DNA, 25 bp, Artificial Sequence
  Probe
tacccatggccaacctcctactcct

SEQ ID NO: 33883 - DNA, 27 bp, Artificial Sequence
  Probe
tacccatggccaacctcctactcctca

SEQ ID NO: 33884 - DNA, 16 bp, Artificial Sequence
  Probe
taccccctctagagcc

SEQ ID NO: 33885 - DNA, 18 bp, Artificial Sequence
  Probe
tacctcctcaaagcaata

SEQ ID NO: 33886 - DNA, 22 bp, Artificial Sequence
  Probe
tacctcctcaaagcaatacact

SEQ ID NO: 33887 - DNA, 36 bp, Artificial Sequence
  Probe
tacctcctcaaagcaatacactgaaaatgtttagac

SEQ ID NO: 33888 - DNA, 18 bp, Artificial Sequence
  Probe
tacgaccccttatttacc

SEQ ID NO: 33889 - DNA, 19 bp, Artificial Sequence
  Probe
tacgaccccttatttaccg

SEQ ID NO: 33890 - DNA, 36 bp, Artificial Sequence
  Probe
tacgggagcccggatagctcagtcggtagagcatca

SEQ ID NO: 33891 - DNA, 42 bp, Artificial Sequence
  Probe
tacgggagcccggatagctcagtcggtagagcatcagacttt

SEQ ID NO: 33892 - DNA, 43 bp, Artificial Sequence
  Probe
tacgggagcccggatagctcagtcggtagagcatcagactttt

SEQ ID NO: 33893 - DNA, 20 bp, Artificial Sequence
  Probe
tacgggccaggattgaaact

SEQ ID NO: 33894 - DNA, 21 bp, Artificial Sequence
  Probe
tacgggccaggattgaaactt

SEQ ID NO: 33895 - DNA, 22 bp, Artificial Sequence
  Probe
tacgggccaggattgaaacttt

SEQ ID NO: 33896 - DNA, 23 bp, Artificial Sequence
  Probe
tacgggccaggattgaaactttt

SEQ ID NO: 33897 - DNA, 16 bp, Artificial Sequence
  Probe
tactataaccacccta

SEQ ID NO: 33898 - DNA, 17 bp, Artificial Sequence
  Probe
tactctgcgttgtggcc

SEQ ID NO: 33899 - DNA, 18 bp, Artificial Sequence
  Probe
tactctgcgttgtggccg

SEQ ID NO: 33900 - DNA, 19 bp, Artificial Sequence
  Probe
tactctgcgttgtggccgc

SEQ ID NO: 33901 - DNA, 20 bp, Artificial Sequence
  Probe
tactctgcgttgtggccgca

SEQ ID NO: 33902 - DNA, 21 bp, Artificial Sequence
  Probe
tactctgcgttgtggccgcag

SEQ ID NO: 33903 - DNA, 23 bp, Artificial Sequence
  Probe
tactgactagtctggtgttattt

SEQ ID NO: 33904 - DNA, 21 bp, Artificial Sequence
  Probe
tactggaaagtgcacttggac

SEQ ID NO: 33905 - DNA, 22 bp, Artificial Sequence
  Probe
tactggaaagtgcacttggacg

SEQ ID NO: 33906 - DNA, 23 bp, Artificial Sequence
  Probe
tactggaaagtgcacttggacga

SEQ ID NO: 33907 - DNA, 24 bp, Artificial Sequence
  Probe
tactggaaagtgcacttggacgaa

SEQ ID NO: 33908 - DNA, 25 bp, Artificial Sequence
  Probe
tactggaaagtgcacttggacgaac

SEQ ID NO: 33909 - DNA, 26 bp, Artificial Sequence
  Probe
tactggaaagtgcacttggacgaacc

SEQ ID NO: 33910 - DNA, 27 bp, Artificial Sequence
  Probe
tactggaaagtgcacttggacgaacca

SEQ ID NO: 33911 - DNA, 28 bp, Artificial Sequence
  Probe
tactttgatagagtaaataataggagct

SEQ ID NO: 33912 - DNA, 36 bp, Artificial Sequence
  Probe
tactttgatagagtaaataataggagcttaaacccc

SEQ ID NO: 33913 - DNA, 17 bp, Artificial Sequence
  Probe
tagaatcttagctttgg

SEQ ID NO: 33914 - DNA, 22 bp, Artificial Sequence
  Probe
tagaatcttagctttgggtgct

SEQ ID NO: 33915 - DNA, 50 bp, Artificial Sequence; identical to SEQ ID NO: 1580
  Probe

SEQ ID NO: 33916 - DNA, 15 bp, Artificial Sequence
  Probe
tagaattctcgcctc

SEQ ID NO: 33917 - DNA, 16 bp, Artificial Sequence
  Probe
tagaattctcgcctcc

SEQ ID NO: 33918 - DNA, 17 bp, Artificial Sequence
  Probe
tagaattctcgcctccc

SEQ ID NO: 33919 - DNA, 15 bp, Artificial Sequence
  Probe
tagaattctcgcctg

SEQ ID NO: 33920 - DNA, 16 bp, Artificial Sequence
  Probe
tagaattctcgcctgc

SEQ ID NO: 33921 - DNA, 17 bp, Artificial Sequence
  Probe
tagaattctcgcctgcc

SEQ ID NO: 33922 - DNA, 18 bp, Artificial Sequence
  Probe
tagaattctcgcctgcca

SEQ ID NO: 33923 - DNA, 19 bp, Artificial Sequence
  Probe
tagaattctcgcctgccac

SEQ ID NO: 33924 - DNA, 22 bp, Artificial Sequence
  Probe
tagaattctcgcctgccacgcg

SEQ ID NO: 33925 - DNA, 23 bp, Artificial Sequence
  Probe
tagaattctcgcctgccacgcgg

SEQ ID NO: 33926 - DNA, 25 bp, Artificial Sequence
  Probe
tagaattctcgcctgccacgcggga

SEQ ID NO: 33927 - DNA, 30 bp, Artificial Sequence; identical to SEQ ID NO: 23407
  Probe

SEQ ID NO: 33928 - DNA, 33 bp, Artificial Sequence
  Probe
tagaattctcgcctgccacgcgggaggcccggg

SEQ ID NO: 33929 - DNA, 34 bp, Artificial Sequence
  Probe
tagaattctcgcctgccacgcgggaggcccgggt

SEQ ID NO: 33930 - DNA, 36 bp, Artificial Sequence
  Probe
tagaattctcgcctgccacgcgggaggcccgggttc

SEQ ID NO: 33931 - DNA, 36 bp, Artificial Sequence
  Probe
tagaattctcgcctgccacgcgggaggcccgggttt

SEQ ID NO: 33932 - DNA, 20 bp, Artificial Sequence
  Probe
tagaattcttgcctgccacg

SEQ ID NO: 33933 - DNA, 15 bp, Artificial Sequence
  Probe
tagacgggctcacat

SEQ ID NO: 33934 - DNA, 16 bp, Artificial Sequence
  Probe
tagacgggctcacatc

SEQ ID NO: 33935 - DNA, 17 bp, Artificial Sequence
  Probe
tagacgggctcacatca

SEQ ID NO: 33936 - DNA, 18 bp, Artificial Sequence
  Probe
tagacgggctcacatcac

SEQ ID NO: 33937 - DNA, 19 bp, Artificial Sequence
  Probe
tagacgggctcacatcacc

SEQ ID NO: 33938 - DNA, 20 bp, Artificial Sequence
  Probe
tagacgggctcacatcaccc

SEQ ID NO: 33939 - DNA, 21 bp, Artificial Sequence
  Probe
tagacgggctcacatcacccc

SEQ ID NO: 33940 - DNA, 24 bp, Artificial Sequence
  Probe
tagacgggctcacatcaccccata

SEQ ID NO: 33941 - DNA, 26 bp, Artificial Sequence
  Probe
tagacgggctcacatcaccccataaa

SEQ ID NO: 33942 - DNA, 30 bp, Artificial Sequence; identical to SEQ ID NO: 7542
  Probe

SEQ ID NO: 33943 - DNA, 36 bp, Artificial Sequence
  Probe
tagagagcctggatagctcagtcggtagagcatcag

SEQ ID NO: 33944 - DNA, 15 bp, Artificial Sequence
  Probe
tagagcatgagaccc

SEQ ID NO: 33945 - DNA, 15 bp, Artificial Sequence
  Probe
tagagcatgagactc

SEQ ID NO: 33946 - DNA, 36 bp, Artificial Sequence
  Probe
tagagcatgagactcttaatctcagggtcgtgggtt

SEQ ID NO: 33947 - DNA, 15 bp, Artificial Sequence
  Probe
tagagcatgggactc

SEQ ID NO: 33948 - DNA, 22 bp, Artificial Sequence
  Probe
tagagcatgggactcttaatcc

SEQ ID NO: 33949 - DNA, 23 bp, Artificial Sequence
  Probe
tagagcatgggactcttaatccc

SEQ ID NO: 33950 - DNA, 35 bp, Artificial Sequence; identical to SEQ ID NO: 23426
  Probe

SEQ ID NO: 33951 - DNA, 36 bp, Artificial Sequence
  Probe
tagagcatgggactcttaatcccagggtcgtgggtt

SEQ ID NO: 33952 - DNA, 16 bp, Artificial Sequence
  Probe
tagagcatttgactgc

SEQ ID NO: 33953 - DNA, 19 bp, Artificial Sequence
  Probe
tagagcccactgtaaagct

SEQ ID NO: 33954 - DNA, 15 bp, Artificial Sequence
  Probe
tagagcggaggactg

SEQ ID NO: 33955 - DNA, 17 bp, Artificial Sequence
  Probe
tagagcggaggactgta

SEQ ID NO: 33956 - DNA, 18 bp, Artificial Sequence
  Probe
tagagcggaggactgtag

SEQ ID NO: 33957 - DNA, 19 bp, Artificial Sequence
  Probe
tagagtaaataataggagc

SEQ ID NO: 33958 - DNA, 27 bp, Artificial Sequence
  Probe
tagagtaaataataggagcttaaaccc

SEQ ID NO: 33959 - DNA, 17 bp, Artificial Sequence
  Probe
tagattgaagccagttg

SEQ ID NO: 33960 - DNA, 22 bp, Artificial Sequence
  Probe
tagattgaagccagttgattag

SEQ ID NO: 33961 - DNA, 23 bp, Artificial Sequence
  Probe
tagattgaagccagttgattagg

SEQ ID NO: 33962 - DNA, 24 bp, Artificial Sequence
  Probe
tagattgaagccagttgattaggg

SEQ ID NO: 33963 - DNA, 25 bp, Artificial Sequence
  Probe
tagattgaagccagttgattagggt

SEQ ID NO: 33964 - DNA, 26 bp, Artificial Sequence
  Probe
tagattgaagccagttgattagggtg

SEQ ID NO: 33965 - DNA, 28 bp, Artificial Sequence
  Probe
tagattgaagccagttgattagggtgct

SEQ ID NO: 33966 - DNA, 29 bp, Artificial Sequence
  Probe
tagattgaagccagttgattagggtgctt

SEQ ID NO: 33967 - DNA, 30 bp, Artificial Sequence
  Probe
tagattgaagccagttgattagggtgctta

SEQ ID NO: 33968 - DNA, 32 bp, Artificial Sequence; identical to SEQ ID NO: 23435
  Probe

SEQ ID NO: 33969 - DNA, 34 bp, Artificial Sequence
  Probe
tagattgaagccagttgattagggtgcttagctg

SEQ ID NO: 33970 - DNA, 35 bp, Artificial Sequence; identical to SEQ ID NO: 7554
  Probe

SEQ ID NO: 33971 - DNA, 37 bp, Artificial Sequence; identical to SEQ ID NO: 7556
  Probe

SEQ ID NO: 33972 - DNA, 38 bp, Artificial Sequence; identical to SEQ ID NO: 23439
  Probe

SEQ ID NO: 33973 - DNA, 39 bp, Artificial Sequence; identical to SEQ ID NO: 23440
  Probe

SEQ ID NO: 33974 - DNA, 40 bp, Artificial Sequence; identical to SEQ ID NO: 7557
  Probe

SEQ ID NO: 33975 - DNA, 41 bp, Artificial Sequence; identical to SEQ ID NO: 23442
  Probe

SEQ ID NO: 33976 - DNA, 50 bp, Artificial Sequence; identical to SEQ ID NO: 1582
  Probe

SEQ ID NO: 33977 - DNA, 15 bp, Artificial Sequence
  Probe
tagcactctggactc

SEQ ID NO: 33978 - DNA, 18 bp, Artificial Sequence
  Probe
tagcactctggactctga

SEQ ID NO: 33979 - DNA, 19 bp, Artificial Sequence
  Probe
tagcactctggactctgaa

SEQ ID NO: 33980 - DNA, 20 bp, Artificial Sequence
  Probe
tagcactctggactctgaat

SEQ ID NO: 33981 - DNA, 21 bp, Artificial Sequence
  Probe
tagcactctggactctgaatc

SEQ ID NO: 33982 - DNA, 22 bp, Artificial Sequence
  Probe
tagcactctggactctgaatcc

SEQ ID NO: 33983 - DNA, 34 bp, Artificial Sequence
  Probe
tagcactctggactctgaatccagcgatccgagt

SEQ ID NO: 33984 - DNA, 35 bp, Artificial Sequence
  Probe
tagcactctggactctgaatccagcgatccgagtt

SEQ ID NO: 33985 - DNA, 36 bp, Artificial Sequence
  Probe
tagcactctggactctgaatccagcgatccgagttc

SEQ ID NO: 33986 - DNA, 21 bp, Artificial Sequence
  Probe
tagcactctggactttgaatc

SEQ ID NO: 33987 - DNA, 34 bp, Artificial Sequence
  Probe
tagcactctggactttgaatccagcgatccgagt

SEQ ID NO: 33988 - DNA, 35 bp, Artificial Sequence
  Probe
tagcactctggactttgaatccagcgatccgagtt

SEQ ID NO: 33989 - DNA, 36 bp, Artificial Sequence
  Probe
tagcactctggactttgaatccagcgatccgagttc

SEQ ID NO: 33990 - DNA, 42 bp, Artificial Sequence; identical to SEQ ID NO: 23452
  Probe

SEQ ID NO: 33991 - DNA, 43 bp, Artificial Sequence
  Probe
tagcattaaccttttaagttaaagattaagagaaccaacacct

SEQ ID NO: 33992 - DNA, 16 bp, Artificial Sequence
  Probe
tagccccaaacccact

SEQ ID NO: 33993 - DNA, 18 bp, Artificial Sequence
  Probe
tagccccaaacccactcc

SEQ ID NO: 33994 - DNA, 19 bp, Artificial Sequence
  Probe
tagccccaaacccactcca

SEQ ID NO: 33995 - DNA, 20 bp, Artificial Sequence
  Probe
tagccccaaacccactccac

SEQ ID NO: 33996 - DNA, 21 bp, Artificial Sequence
  Probe
tagccccaaacccactccacc

SEQ ID NO: 33997 - DNA, 22 bp, Artificial Sequence
  Probe
tagccccaaacccactccacct

SEQ ID NO: 33998 - DNA, 27 bp, Artificial Sequence
  Probe
tagccgcccggctagctcagtcggtag

SEQ ID NO: 33999 - DNA, 28 bp, Artificial Sequence
  Probe
tagccgcccggctagctcagtcggtaga

SEQ ID NO: 34000 - DNA, 29 bp, Artificial Sequence
  Probe
tagccgcccggctagctcagtcggtagag

SEQ ID NO: 34001 - DNA, 18 bp, Artificial Sequence
  Probe
tagccgtaaggcggctgt

SEQ ID NO: 34002 - DNA, 19 bp, Artificial Sequence
  Probe
tagccgtaaggcggctgtt

SEQ ID NO: 34003 - DNA, 20 bp, Artificial Sequence
  Probe
tagccgtaaggcggctgttt

SEQ ID NO: 34004 - DNA, 21 bp, Artificial Sequence
  Probe
tagccgtaaggcggctgtttt

SEQ ID NO: 34005 - DNA, 16 bp, Artificial Sequence
  Probe
tagcctttctattagc

SEQ ID NO: 34006 - DNA, 26 bp, Artificial Sequence
  Probe
tagctcagctggtagagcggaggact

SEQ ID NO: 34007 - DNA, 25 bp, Artificial Sequence
  Probe
tagctcaggggttagagcactggtc

SEQ ID NO: 34008 - DNA, 26 bp, Artificial Sequence
  Probe
tagctcaggggttagagcactggtct

SEQ ID NO: 34009 - DNA, 16 bp, Artificial Sequence
  Probe
tagctcagtcggtaga

SEQ ID NO: 34010 - DNA, 17 bp, Artificial Sequence
  Probe
tagctcagtcggtagag

SEQ ID NO: 34011 - DNA, 18 bp, Artificial Sequence
  Probe
tagctcagtcggtagagc

SEQ ID NO: 34012 - DNA, 25 bp, Artificial Sequence
  Probe
tagctcagtcggtagagcatcagac

SEQ ID NO: 34013 - DNA, 27 bp, Artificial Sequence
  Probe
tagctcagtcggtagagcatcagactt

SEQ ID NO: 34014 - DNA, 30 bp, Artificial Sequence; identical to SEQ ID NO: 14184
  Probe

SEQ ID NO: 34015 - DNA, 25 bp, Artificial Sequence
  Probe
tagctcagtcggtagagcatgagac

SEQ ID NO: 34016 - DNA, 26 bp, Artificial Sequence
  Probe
tagctcagtcggtagagcatgagact

SEQ ID NO: 34017 - DNA, 28 bp, Artificial Sequence
  Probe
tagctcagtcggtagagcatgagactct

SEQ ID NO: 34018 - DNA, 28 bp, Artificial Sequence
  Probe
tagctcagtcggtagagcatgggactct

SEQ ID NO: 34019 - DNA, 36 bp, Artificial Sequence
  Probe
tagctcagttgggagagcgttagactgaagatctaa

SEQ ID NO: 34020 - DNA, 26 bp, Artificial Sequence
  Probe
tagctcagttggtagagcggaggact

SEQ ID NO: 34021 - DNA, 15 bp, Artificial Sequence
  Probe
tagctgccttccaag

SEQ ID NO: 34022 - DNA, 33 bp, Artificial Sequence
  Probe
tagctgttaactaagtgtttgtgggtttaagtc

SEQ ID NO: 34023 - DNA, 26 bp, Artificial Sequence
  Probe
tagctttgggtgctaatggtggagtt

SEQ ID NO: 34024 - DNA, 27 bp, Artificial Sequence
  Probe
tagctttgggtgctaatggtggagtta

SEQ ID NO: 34025 - DNA, 28 bp, Artificial Sequence
  Probe
tagctttgggtgctaatggtggagttaa

SEQ ID NO: 34026 - DNA, 29 bp, Artificial Sequence
  Probe
tagctttgggtgctaatggtggagttaaa

SEQ ID NO: 34027 - DNA, 30 bp, Artificial Sequence
  Probe
tagctttgggtgctaatggtggagttaaag

SEQ ID NO: 34028 - DNA, 31 bp, Artificial Sequence
  Probe
tagctttgggtgctaatggtggagttaaaga

SEQ ID NO: 34029 - DNA, 32 bp, Artificial Sequence
  Probe
tagctttgggtgctaatggtggagttaaagac

SEQ ID NO: 34030 - DNA, 33 bp, Artificial Sequence
  Probe
tagctttgggtgctaatggtggagttaaagact

SEQ ID NO: 34031 - DNA, 45 bp, Artificial Sequence
  Probe
tagctttgggtgctaatggtggagttaaagactttttctctgatt

SEQ ID NO: 34032 - DNA, 17 bp, Artificial Sequence
  Probe
taggactatgagaatcg

SEQ ID NO: 34033 - DNA, 21 bp, Artificial Sequence
  Probe
taggactatgagaatcgaacc

SEQ ID NO: 34034 - DNA, 22 bp, Artificial Sequence
  Probe
taggactatgagaatcgaaccc

SEQ ID NO: 34035 - DNA, 32 bp, Artificial Sequence
  Probe
taggactatgagaatcgaacccatccctgaga

SEQ ID NO: 34036 - DNA, 15 bp, Artificial Sequence
  Probe
taggagatttcaact

SEQ ID NO: 34037 - DNA, 16 bp, Artificial Sequence
  Probe
taggagatttcaactt

SEQ ID NO: 34038 - DNA, 20 bp, Artificial Sequence
  Probe
taggagatttcaacttaact

SEQ ID NO: 34039 - DNA, 21 bp, Artificial Sequence
  Probe
taggagatttcaacttaactt

SEQ ID NO: 34040 - DNA, 22 bp, Artificial Sequence
  Probe
taggagatttcaacttaacttg

SEQ ID NO: 34041 - DNA, 24 bp, Artificial Sequence
  Probe
taggagatttcaacttaacttgac

SEQ ID NO: 34042 - DNA, 25 bp, Artificial Sequence
  Probe
taggagatttcaacttaacttgacc

SEQ ID NO: 34043 - DNA, 26 bp, Artificial Sequence
  Probe
taggagatttcaacttaacttgaccg

SEQ ID NO: 34044 - DNA, 28 bp, Artificial Sequence
  Probe
taggagatttcaacttaacttgaccgct

SEQ ID NO: 34045 - DNA, 29 bp, Artificial Sequence
  Probe
taggagatttcaacttaacttgaccgctc

SEQ ID NO: 34046 - DNA, 30 bp, Artificial Sequence; identical to SEQ ID NO: 11700
  Probe

SEQ ID NO: 34047 - DNA, 33 bp, Artificial Sequence; identical to SEQ ID NO: 7577
  Probe

SEQ ID NO: 34048 - DNA, 34 bp, Artificial Sequence; identical to SEQ ID NO: 7578
  Probe

SEQ ID NO: 34049 - DNA, 35 bp, Artificial Sequence; identical to SEQ ID NO: 7579
  Probe

SEQ ID NO: 34050 - DNA, 36 bp, Artificial Sequence
  Probe
taggagatttcaacttaacttgaccgctctgagcta

SEQ ID NO: 34051 - DNA, 15 bp, Artificial Sequence
  Probe
taggagcttaaaccc

SEQ ID NO: 34052 - DNA, 17 bp, Artificial Sequence
  Probe
taggagcttaaaccccc

SEQ ID NO: 34053 - DNA, 21 bp, Artificial Sequence
  Probe
taggatgcgagaggtcccggg

SEQ ID NO: 34054 - DNA, 22 bp, Artificial Sequence
  Probe
taggatgcgagaggtcccgggt

SEQ ID NO: 34055 - DNA, 23 bp, Artificial Sequence
  Probe
taggatgcgagaggtcccgggtt

SEQ ID NO: 34056 - DNA, 15 bp, Artificial Sequence
  Probe
taggatggggtgtga

SEQ ID NO: 34057 - DNA, 16 bp, Artificial Sequence
  Probe
taggatggggtgtgat

SEQ ID NO: 34058 - DNA, 17 bp, Artificial Sequence
  Probe
taggatggggtgtgata

SEQ ID NO: 34059 - DNA, 18 bp, Artificial Sequence
  Probe
taggatggggtgtgatag

SEQ ID NO: 34060 - DNA, 37 bp, Artificial Sequence; identical to SEQ ID NO: 7588
  Probe

SEQ ID NO: 34061 - DNA, 38 bp, Artificial Sequence; identical to SEQ ID NO: 23494
  Probe

SEQ ID NO: 34062 - DNA, 39 bp, Artificial Sequence
  Probe
taggatggggtgtgataggtggcacggagaattttggat

SEQ ID NO: 34063 - DNA, 40 bp, Artificial Sequence
  Probe
taggatggggtgtgataggtggcacggagaattttggatt

SEQ ID NO: 34064 - DNA, 42 bp, Artificial Sequence
  Probe
taggatggggtgtgataggtggcacggagaattttggattct

SEQ ID NO: 34065 - DNA, 43 bp, Artificial Sequence
  Probe
taggatggggtgtgataggtggcacggagaattttggattctc

SEQ ID NO: 34066 - DNA, 44 bp, Artificial Sequence
  Probe
taggatggggtgtgataggtggcacggagaattttggattctca

SEQ ID NO: 34067 - DNA, 50 bp, Artificial Sequence; identical to SEQ ID NO: 23496
  Probe

SEQ ID NO: 34068 - DNA, 15 bp, Artificial Sequence
  Probe
taggattcggcgctc

SEQ ID NO: 34069 - DNA, 23 bp, Artificial Sequence
  Probe
taggattcggcgctctcaccgcc

SEQ ID NO: 34070 - DNA, 29 bp, Artificial Sequence
  Probe
taggattcggcgctctcaccgccgcggcc

SEQ ID NO: 34071 - DNA, 36 bp, Artificial Sequence
  Probe
taggattcggcgctctcaccgccgcggcccgggttc

SEQ ID NO: 34072 - DNA, 36 bp, Artificial Sequence
  Probe
taggccccaaaaattttggtgcaactccaaataaaa

SEQ ID NO: 34073 - DNA, 19 bp, Artificial Sequence
  Probe
taggcctctttttaccagc

SEQ ID NO: 34074 - DNA, 18 bp, Artificial Sequence
  Probe
taggctgtcagctcttcc

SEQ ID NO: 34075 - DNA, 19 bp, Artificial Sequence
  Probe
tagggctttggctgtgggg

SEQ ID NO: 34076 - DNA, 16 bp, Artificial Sequence
  Probe
taggggtatgattctc

SEQ ID NO: 34077 - DNA, 18 bp, Artificial Sequence
  Probe
taggggtatgattctcgc

SEQ ID NO: 34078 - DNA, 19 bp, Artificial Sequence
  Probe
taggggtatgattctcgct

SEQ ID NO: 34079 - DNA, 20 bp, Artificial Sequence
  Probe
taggggtatgattctcgctt

SEQ ID NO: 34080 - DNA, 19 bp, Artificial Sequence
  Probe
taggggtatgattctcggt

SEQ ID NO: 34081 - DNA, 18 bp, Artificial Sequence
  Probe
tagggtgcgagaggtccc

SEQ ID NO: 34082 - DNA, 21 bp, Artificial Sequence
  Probe
tagggtgcgagaggtcccggg

SEQ ID NO: 34083 - DNA, 22 bp, Artificial Sequence
  Probe
tagggtgcgagaggtcccgggt

SEQ ID NO: 34084 - DNA, 23 bp, Artificial Sequence
  Probe
tagggtgcgagaggtcccgggtt

SEQ ID NO: 34085 - DNA, 16 bp, Artificial Sequence
  Probe
tagggtgcttagctgt

SEQ ID NO: 34086 - DNA, 17 bp, Artificial Sequence
  Probe
tagggtgcttagctgtt

SEQ ID NO: 34087 - DNA, 21 bp, Artificial Sequence
  Probe
tagggtgcttagctgttaact

SEQ ID NO: 34088 - DNA, 36 bp, Artificial Sequence
  Probe
tagggtgcttagctgttaactaagtgtttgtgggtt

SEQ ID NO: 34089 - DNA, 15 bp, Artificial Sequence
  Probe
tagggtgtgcgtgtt

SEQ ID NO: 34090 - DNA, 16 bp, Artificial Sequence
  Probe
tagggtgtgcgtgttt

SEQ ID NO: 34091 - DNA, 17 bp, Artificial Sequence
  Probe
tagggtgtgcgtgtttt

SEQ ID NO: 34092 - DNA, 18 bp, Artificial Sequence
  Probe
tagggtgtgcgtgttttt

SEQ ID NO: 34093 - DNA, 19 bp, Artificial Sequence
  Probe
tagggtgtgcgtgtttttt

SEQ ID NO: 34094 - DNA, 20 bp, Artificial Sequence
  Probe
tagggtgtgcgtgttttttt

SEQ ID NO: 34095 - DNA, 21 bp, Artificial Sequence
  Probe
tagggtgtgcgtgtttttttt

SEQ ID NO: 34096 - DNA, 17 bp, Artificial Sequence
  Probe
taggtagcgcatcagtc

SEQ ID NO: 34097 - DNA, 28 bp, Artificial Sequence
  Probe
taggtttggtcctagcctttctattagc

SEQ ID NO: 34098 - DNA, 17 bp, Artificial Sequence
  Probe
tagtaaacaggagatcc

SEQ ID NO: 34099 - DNA, 16 bp, Artificial Sequence
  Probe
tagtaccgttaacttc

SEQ ID NO: 34100 - DNA, 17 bp, Artificial Sequence
  Probe
tagtaccgttaacttcc

SEQ ID NO: 34101 - DNA, 34 bp, Artificial Sequence
  Probe
tagtaccgttaacttccaattaactagttttgac

SEQ ID NO: 34102 - DNA, 34 bp, Artificial Sequence
  Probe
tagtactctgcgttgtggccgcagcaacctcggt

SEQ ID NO: 34103 - DNA, 36 bp, Artificial Sequence
  Probe
tagtactctgcgttgtggccgcagcaacctcggttc

SEQ ID NO: 34104 - DNA, 23 bp, Artificial Sequence
  Probe
tagtctaggctgtcagctcttcc

SEQ ID NO: 34105 - DNA, 18 bp, Artificial Sequence
  Probe
tagtggctaggattcggc

SEQ ID NO: 34106 - DNA, 19 bp, Artificial Sequence
  Probe
tagtggctaggattcggcg

SEQ ID NO: 34107 - DNA, 18 bp, Artificial Sequence
  Probe
tagtggtatgattctcgc

SEQ ID NO: 34108 - DNA, 19 bp, Artificial Sequence
  Probe
tagtggtatgattctcgct

SEQ ID NO: 34109 - DNA, 36 bp, Artificial Sequence
  Probe
tagtggtgagcatagctgccttccaagcagttgacc

SEQ ID NO: 34110 - DNA, 19 bp, Artificial Sequence
  Probe
tagtggtgagtatccccgc

SEQ ID NO: 34111 - DNA, 24 bp, Artificial Sequence
  Probe
tagtggtgagtatccccgcctgtc

SEQ ID NO: 34112 - DNA, 26 bp, Artificial Sequence
  Probe
tagtggtgagtatccccgcctgtcac

SEQ ID NO: 34113 - DNA, 36 bp, Artificial Sequence; identical to SEQ ID NO: 14212
  Probe

SEQ ID NO: 34114 - DNA, 18 bp, Artificial Sequence
  Probe
tagtggttaggattcggc

SEQ ID NO: 34115 - DNA, 19 bp, Artificial Sequence
  Probe
tagtggttaggattcggcg

SEQ ID NO: 34116 - DNA, 20 bp, Artificial Sequence
  Probe
tagtggttaggattcggcgc

SEQ ID NO: 34117 - DNA, 21 bp, Artificial Sequence
  Probe
tagtggttaggattcggcgct

SEQ ID NO: 34118 - DNA, 18 bp, Artificial Sequence
  Probe
tagtggttagtactctgc

SEQ ID NO: 34119 - DNA, 20 bp, Artificial Sequence
  Probe
tagtggttagtactctgcgt

SEQ ID NO: 34120 - DNA, 22 bp, Artificial Sequence
  Probe
tagtggttagtactctgcgttg

SEQ ID NO: 34121 - DNA, 23 bp, Artificial Sequence
  Probe
tagtggttagtactctgcgttgt

SEQ ID NO: 34122 - DNA, 36 bp, Artificial Sequence
  Probe
tagtggttagtactctgcgttgtggccgcagcaacc

SEQ ID NO: 34123 - DNA, 21 bp, Artificial Sequence
  Probe
tagtggttatcacgtctgctt

SEQ ID NO: 34124 - DNA, 25 bp, Artificial Sequence
  Probe
tagtgtagtggtcatcacgttcgcc

SEQ ID NO: 34125 - DNA, 16 bp, Artificial Sequence
  Probe
tagtgtagtggttatc

SEQ ID NO: 34126 - DNA, 24 bp, Artificial Sequence
  Probe
tagtgtagtggttatcacgtctgc

SEQ ID NO: 34127 - DNA, 26 bp, Artificial Sequence
  Probe
tagtgtagtggttatcacgtctgctt

SEQ ID NO: 34128 - DNA, 27 bp, Artificial Sequence
  Probe
tagtgtagtggttatcacgtctgcttt

SEQ ID NO: 34129 - DNA, 28 bp, Artificial Sequence
  Probe
tagtgtagtggttatcacgtctgcttta

SEQ ID NO: 34130 - DNA, 25 bp, Artificial Sequence
  Probe
tagtgtagtggttatcacgttcgcc

SEQ ID NO: 34131 - DNA, 26 bp, Artificial Sequence
  Probe
tagtgtagtggttatcacgttcgcct

SEQ ID NO: 34132 - DNA, 33 bp, Artificial Sequence
  Probe
tagttgaaatacaacgatggtttttcatatcat

SEQ ID NO: 34133 - DNA, 29 bp, Artificial Sequence
  Probe
tagtttaaacaaaacgaatgatttcgact

SEQ ID NO: 34134 - DNA, 30 bp, Artificial Sequence
  Probe
tagtttaaacaaaacgaatgatttcgactc

SEQ ID NO: 34135 - DNA, 36 bp, Artificial Sequence
  Probe
tagtttaaccaaaacatcagattgtgaatctgacaa

SEQ ID NO: 34136 - DNA, 20 bp, Artificial Sequence
  Probe
tataaatagtaccgttaact

SEQ ID NO: 34137 - DNA, 22 bp, Artificial Sequence
  Probe
tataaatagtaccgttaacttc

SEQ ID NO: 34138 - DNA, 23 bp, Artificial Sequence
  Probe
tataaatagtaccgttaacttcc

SEQ ID NO: 34139 - DNA, 36 bp, Artificial Sequence
  Probe
tataaatagtaccgttaacttccaattaactagttt

SEQ ID NO: 34140 - DNA, 15 bp, Artificial Sequence
  Probe
tatacccacacccac

SEQ ID NO: 34141 - DNA, 16 bp, Artificial Sequence
  Probe
tatacccacacccacc

SEQ ID NO: 34142 - DNA, 17 bp, Artificial Sequence
  Probe
tatacccacacccaccc

SEQ ID NO: 34143 - DNA, 18 bp, Artificial Sequence
  Probe
tatacccacacccaccca

SEQ ID NO: 34144 - DNA, 19 bp, Artificial Sequence
  Probe
tatacccacacccacccaa

SEQ ID NO: 34145 - DNA, 20 bp, Artificial Sequence
  Probe
tatacccacacccacccaag

SEQ ID NO: 34146 - DNA, 21 bp, Artificial Sequence
  Probe
tatacccacacccacccaaga

SEQ ID NO: 34147 - DNA, 22 bp, Artificial Sequence
  Probe
tatacccacacccacccaagaa

SEQ ID NO: 34148 - DNA, 23 bp, Artificial Sequence
  Probe
tatacccacacccacccaagaac

SEQ ID NO: 34149 - DNA, 24 bp, Artificial Sequence
  Probe
tatacccacacccacccaagaaca

SEQ ID NO: 34150 - DNA, 25 bp, Artificial Sequence
  Probe
tatacccacacccacccaagaacag

SEQ ID NO: 34151 - DNA, 26 bp, Artificial Sequence
  Probe
tatacccacacccacccaagaacagg

SEQ ID NO: 34152 - DNA, 27 bp, Artificial Sequence
  Probe
tatacccacacccacccaagaacaggg

SEQ ID NO: 34153 - DNA, 28 bp, Artificial Sequence
  Probe
tatacccacacccacccaagaacagggt

SEQ ID NO: 34154 - DNA, 29 bp, Artificial Sequence
  Probe
tatacccacacccacccaagaacagggtt

SEQ ID NO: 34155 - DNA, 30 bp, Artificial Sequence; identical to SEQ ID NO: 7623
  Probe

SEQ ID NO: 34156 - DNA, 31 bp, Artificial Sequence; identical to SEQ ID NO: 7624
  Probe

SEQ ID NO: 34157 - DNA, 32 bp, Artificial Sequence; identical to SEQ ID NO: 7625
  Probe

SEQ ID NO: 34158 - DNA, 33 bp, Artificial Sequence; identical to SEQ ID NO: 7626
  Probe

SEQ ID NO: 34159 - DNA, 34 bp, Artificial Sequence; identical to SEQ ID NO: 7627
  Probe

SEQ ID NO: 34160 - DNA, 35 bp, Artificial Sequence; identical to SEQ ID NO: 7628
  Probe

SEQ ID NO: 34161 - DNA, 36 bp, Artificial Sequence; identical to SEQ ID NO: 7629
  Probe

SEQ ID NO: 34162 - DNA, 17 bp, Artificial Sequence
  Probe
tatacccttcccgtact

SEQ ID NO: 34163 - DNA, 27 bp, Artificial Sequence
  Probe
tatagctcaggggtagagcatttgact

SEQ ID NO: 34164 - DNA, 23 bp, Artificial Sequence
  Probe
tatagtggttagtactctgcgtt

SEQ ID NO: 34165 - DNA, 31 bp, Artificial Sequence
  Probe
tatagtttaaacaaaacgaatgatttcgact

SEQ ID NO: 34166 - DNA, 32 bp, Artificial Sequence
  Probe
tatagtttaaacaaaacgaatgatttcgactc

SEQ ID NO: 34167 - DNA, 33 bp, Artificial Sequence
  Probe
tatatagtttaaacaaaacgaatgatttcgact

SEQ ID NO: 34168 - DNA, 20 bp, Artificial Sequence
  Probe
tatcacgttcgcctaacacg

SEQ ID NO: 34169 - DNA, 20 bp, Artificial Sequence
  Probe
tatcacgttcgcctcacacg

SEQ ID NO: 34170 - DNA, 20 bp, Artificial Sequence
  Probe
tatcattggtcgtggttgta

SEQ ID NO: 34171 - DNA, 22 bp, Artificial Sequence
  Probe
tatcattggtcgtggttgtagt

SEQ ID NO: 34172 - DNA, 26 bp, Artificial Sequence
  Probe
tatcattggtcgtggttgtagtccgt

SEQ ID NO: 34173 - DNA, 28 bp, Artificial Sequence
  Probe
tatcattggtcgtggttgtagtccgtgc

SEQ ID NO: 34174 - DNA, 34 bp, Artificial Sequence
  Probe
tatcattggtcgtggttgtagtccgtgcgagaat

SEQ ID NO: 34175 - DNA, 35 bp, Artificial Sequence
  Probe
tatcattggtcgtggttgtagtccgtgcgagaata

SEQ ID NO: 34176 - DNA, 36 bp, Artificial Sequence
  Probe
tatcattggtcgtggttgtagtccgtgcgagaataa

SEQ ID NO: 34177 - DNA, 15 bp, Artificial Sequence
  Probe
tatccattggtctta

SEQ ID NO: 34178 - DNA, 16 bp, Artificial Sequence
  Probe
tatccattggtcttag

SEQ ID NO: 34179 - DNA, 19 bp, Artificial Sequence
  Probe
tatccattggtcttaggcc

SEQ ID NO: 34180 - DNA, 22 bp, Artificial Sequence
  Probe
tatccattggtcttaggcccca

SEQ ID NO: 34181 - DNA, 32 bp, Artificial Sequence
  Probe
tatccattggtcttaggccccaaaaattttgg

SEQ ID NO: 34182 - DNA, 36 bp, Artificial Sequence
  Probe
tatccattggtcttaggccccaaaaattttggtgca

SEQ ID NO: 34183 - DNA, 15 bp, Artificial Sequence
  Probe
tatcgggcccatacc

SEQ ID NO: 34184 - DNA, 16 bp, Artificial Sequence
  Probe
tatcgggcccataccc

SEQ ID NO: 34185 - DNA, 30 bp, Artificial Sequence
  Probe
tatcgggcccataccccgaaaatgttggtt

SEQ ID NO: 34186 - DNA, 15 bp, Artificial Sequence
  Probe
tatgagaatcgaacc

SEQ ID NO: 34187 - DNA, 16 bp, Artificial Sequence
  Probe
tatgagaatcgaaccc

SEQ ID NO: 34188 - DNA, 17 bp, Artificial Sequence
  Probe
tatgagaatcgaaccca

SEQ ID NO: 34189 - DNA, 19 bp, Artificial Sequence
  Probe
tatgagaatcgaacccatc

SEQ ID NO: 34190 - DNA, 20 bp, Artificial Sequence
  Probe
tatgagaatcgaacccatcc

SEQ ID NO: 34191 - DNA, 21 bp, Artificial Sequence
  Probe
tatgagaatcgaacccatccc

SEQ ID NO: 34192 - DNA, 22 bp, Artificial Sequence
  Probe
tatgagaatcgaacccatccct

SEQ ID NO: 34193 - DNA, 24 bp, Artificial Sequence
  Probe
tatgagaatcgaacccatccctga

SEQ ID NO: 34194 - DNA, 25 bp, Artificial Sequence
  Probe
tatgagaatcgaacccatccctgag

SEQ ID NO: 34195 - DNA, 26 bp, Artificial Sequence
  Probe
tatgagaatcgaacccatccctgaga

SEQ ID NO: 34196 - DNA, 35 bp, Artificial Sequence
  Probe
tatgattctcgcttaggatgcgagaggtcccgggt

SEQ ID NO: 34197 - DNA, 34 bp, Artificial Sequence
  Probe
tatgattctcgcttagggtgcgagaggtcccggg

SEQ ID NO: 34198 - DNA, 35 bp, Artificial Sequence; identical to SEQ ID NO: 23612
  Probe

SEQ ID NO: 34199 - DNA, 36 bp, Artificial Sequence
  Probe
tatgattctcgcttagggtgcgagaggtcccgggtt

SEQ ID NO: 34200 - DNA, 34 bp, Artificial Sequence; identical to SEQ ID NO: 23613
  Probe

SEQ ID NO: 34201 - DNA, 36 bp, Artificial Sequence; identical to SEQ ID NO: 23615
  Probe

SEQ ID NO: 34202 - DNA, 34 bp, Artificial Sequence
  Probe
tatgattctcgcttcgggtgtgagaggtcccggg

SEQ ID NO: 34203 - DNA, 36 bp, Artificial Sequence
  Probe
tatgattctcgcttcgggtgtgagaggtcccgggtt

SEQ ID NO: 34204 - DNA, 34 bp, Artificial Sequence; identical to SEQ ID NO: 23616
  Probe

SEQ ID NO: 34205 - DNA, 34 bp, Artificial Sequence
  Probe
tatgattctcggtttgggtccgagaggtcccggg

SEQ ID NO: 34206 - DNA, 35 bp, Artificial Sequence
  Probe
tatgattctcggtttgggtccgagaggtcccgggt

SEQ ID NO: 34207 - DNA, 36 bp, Artificial Sequence
  Probe
tatgattctcggtttgggtccgagaggtcccgggtt

SEQ ID NO: 34208 - DNA, 16 bp, Artificial Sequence
  Probe
tatgtagcttacctcc

SEQ ID NO: 34209 - DNA, 17 bp, Artificial Sequence
  Probe
tatgtagcttacctcct

SEQ ID NO: 34210 - DNA, 15 bp, Artificial Sequence
  Probe
tattctctgtggctt

SEQ ID NO: 34211 - DNA, 36 bp, Artificial Sequence
  Probe
tattgaattgcaaattcgaagaagcagcttcaaacc

SEQ ID NO: 34212 - DNA, 27 bp, Artificial Sequence
  Probe
tatttctaggactatgagaatcgaacc

SEQ ID NO: 34213 - DNA, 28 bp, Artificial Sequence
  Probe
tatttctaggactatgagaatcgaaccc

SEQ ID NO: 34214 - DNA, 36 bp, Artificial Sequence
  Probe
tatttctaggactatgagaatcgaacccatccctga

SEQ ID NO: 34215 - DNA, 16 bp, Artificial Sequence
  Probe
tcaaacctgccggggc

SEQ ID NO: 34216 - DNA, 20 bp, Artificial Sequence
  Probe
tcaaacctgccggggcttct

SEQ ID NO: 34217 - DNA, 16 bp, Artificial Sequence
  Probe
tcaaagcaatacactg

SEQ ID NO: 34218 - DNA, 33 bp, Artificial Sequence
  Probe
tcaaagcaatacactgaaaatgtttagacgggc

SEQ ID NO: 34219 - DNA, 34 bp, Artificial Sequence
  Probe
tcaaagcaatacactgaaaatgtttagacgggct

SEQ ID NO: 34220 - DNA, 35 bp, Artificial Sequence
  Probe
tcaaagcaatacactgaaaatgtttagacgggctc

SEQ ID NO: 34221 - DNA, 37 bp, Artificial Sequence; identical to SEQ ID NO: 1604
  Probe

SEQ ID NO: 34222 - DNA, 36 bp, Artificial Sequence
  Probe
tcaaagccctcagtaagttgcaatacttaatttctg

SEQ ID NO: 34223 - DNA, 36 bp, Artificial Sequence
  Probe
tcaaaggttgtgggttcgagtcccaccagagtcgct

SEQ ID NO: 34224 - DNA, 20 bp, Artificial Sequence
  Probe
tcaaagttaaattataggct

SEQ ID NO: 34225 - DNA, 36 bp, Artificial Sequence; identical to SEQ ID NO: 23626
  Probe

SEQ ID NO: 34226 - DNA, 22 bp, Artificial Sequence
  Probe
tcaaatcacgtcggggtcaaca

SEQ ID NO: 34227 - DNA, 17 bp, Artificial Sequence
  Probe
tcaaatcccggacgagc

SEQ ID NO: 34228 - DNA, 18 bp, Artificial Sequence
  Probe
tcaaatcccggacgagcc

SEQ ID NO: 34229 - DNA, 19 bp, Artificial Sequence
  Probe
tcaaatcccggacgagccc

SEQ ID NO: 34230 - DNA, 22 bp, Artificial Sequence
  Probe
tcaaatcccggacgagcccaca

SEQ ID NO: 34231 - DNA, 22 bp, Artificial Sequence
  Probe
tcaaatcccggacgagccccct

SEQ ID NO: 34232 - DNA, 22 bp, Artificial Sequence
  Probe
tcaaatcccggacgagccctca

SEQ ID NO: 34233 - DNA, 22 bp, Artificial Sequence
  Probe
tcaaatccgggtgccccctcaa

SEQ ID NO: 34234 - DNA, 22 bp, Artificial Sequence
  Probe
tcaaatctcggtggaacctgca

SEQ ID NO: 34235 - DNA, 20 bp, Artificial Sequence
  Probe
tcaaatctcggtgggacctc

SEQ ID NO: 34236 - DNA, 15 bp, Artificial Sequence
  Probe
tcaacggtcggcgaa

SEQ ID NO: 34237 - DNA, 16 bp, Artificial Sequence
  Probe
tcaacggtcggcgaac

SEQ ID NO: 34238 - DNA, 17 bp, Artificial Sequence
  Probe
tcaacggtcggcgaaca

SEQ ID NO: 34239 - DNA, 18 bp, Artificial Sequence
  Probe
tcaacggtcggcgaacat

SEQ ID NO: 34240 - DNA, 19 bp, Artificial Sequence
  Probe
tcaacggtcggcgaacatc

SEQ ID NO: 34241 - DNA, 21 bp, Artificial Sequence
  Probe
tcaacttaacttgaccgctct

SEQ ID NO: 34242 - DNA, 23 bp, Artificial Sequence
  Probe
tcaacttaacttgaccgctctga

SEQ ID NO: 34243 - DNA, 24 bp, Artificial Sequence
  Probe
tcaacttaacttgaccgctctgag

SEQ ID NO: 34244 - DNA, 25 bp, Artificial Sequence
  Probe
tcaacttaacttgaccgctctgagc

SEQ ID NO: 34245 - DNA, 36 bp, Artificial Sequence
  Probe
tcaacttaacttgaccgctctgagctaaacctagcc

SEQ ID NO: 34246 - DNA, 16 bp, Artificial Sequence
  Probe
tcaagaggtccccggt

SEQ ID NO: 34247 - DNA, 22 bp, Artificial Sequence
  Probe
tcaagtccctgtccaggcgcta

SEQ ID NO: 34248 - DNA, 22 bp, Artificial Sequence
  Probe
tcaagtccctgttcgggcggca

SEQ ID NO: 34249 - DNA, 22 bp, Artificial Sequence
  Probe
tcaatccccagcacctccacaa

SEQ ID NO: 34250 - DNA, 21 bp, Artificial Sequence
  Probe
tcaatccccggcacctccacc

SEQ ID NO: 34251 - DNA, 17 bp, Artificial Sequence
  Probe
tcacaagaactgctaac

SEQ ID NO: 34252 - DNA, 19 bp, Artificial Sequence
  Probe
tcacaagaactgctaactc

SEQ ID NO: 34253 - DNA, 20 bp, Artificial Sequence
  Probe
tcacaagaactgctaactca

SEQ ID NO: 34254 - DNA, 22 bp, Artificial Sequence
  Probe
tcacaagaactgctaactcatg

SEQ ID NO: 34255 - DNA, 24 bp, Artificial Sequence
  Probe
tcacaagaactgctaactcatgcc

SEQ ID NO: 34256 - DNA, 32 bp, Artificial Sequence; identical to SEQ ID NO: 7660
  Probe

SEQ ID NO: 34257 - DNA, 33 bp, Artificial Sequence
  Probe
tcacaagaactgctaactcatgcccccatgtct

SEQ ID NO: 34258 - DNA, 37 bp, Artificial Sequence
  Probe
tcacaagaactgctaactcatgcccccatgtctaaca

SEQ ID NO: 34259 - DNA, 40 bp, Artificial Sequence
  Probe
tcacaagaactgctaactcatgcccccatgtctaacaaca

SEQ ID NO: 34260 - DNA, 45 bp, Artificial Sequence; identical to SEQ ID NO: 1607
  Probe

SEQ ID NO: 34261 - DNA, 22 bp, Artificial Sequence
  Probe
tcacacgcgaaaggtccccggt

SEQ ID NO: 34262 - DNA, 36 bp, Artificial Sequence
  Probe
tcacagtgtcaggatggccgagtggtctaaggcgcc

SEQ ID NO: 34263 - DNA, 36 bp, Artificial Sequence
  Probe
tcacccaggcggcccgggttcgactcccggtgtggg

SEQ ID NO: 34264 - DNA, 41 bp, Artificial Sequence; identical to SEQ ID NO: 7674
  Probe

SEQ ID NO: 34265 - DNA, 41 bp, Artificial Sequence
  Probe
tcacccaggcggcccgggttcgactcccggtgtgggaatga

SEQ ID NO: 34266 - DNA, 15 bp, Artificial Sequence
  Probe
tcaccgccgcggccc

SEQ ID NO: 34267 - DNA, 16 bp, Artificial Sequence
  Probe
tcaccgccgcggcccg

SEQ ID NO: 34268 - DNA, 19 bp, Artificial Sequence
  Probe
tcaccgccgcggcccgggt

SEQ ID NO: 34269 - DNA, 38 bp, Artificial Sequence; identical to SEQ ID NO: 23666
  Probe

SEQ ID NO: 34270 - DNA, 39 bp, Artificial Sequence; identical to SEQ ID NO: 7679
  Probe

SEQ ID NO: 34271 - DNA, 41 bp, Artificial Sequence
  Probe
tcaccgccgcggcccgggttcgattcccggtcagggaaaga

SEQ ID NO: 34272 - DNA, 39 bp, Artificial Sequence; identical to SEQ ID NO: 7680
  Probe

SEQ ID NO: 34273 - DNA, 40 bp, Artificial Sequence
  Probe
tcaccgccgcggcccgggttcgattcccggtcagggaagc

SEQ ID NO: 34274 - DNA, 41 bp, Artificial Sequence
  Probe
tcaccgccgcggcccgggttcgattcccggtcagggaagcc

SEQ ID NO: 34275 - DNA, 39 bp, Artificial Sequence; identical to SEQ ID NO: 7681
  Probe

SEQ ID NO: 34276 - DNA, 41 bp, Artificial Sequence
  Probe
tcaccgccgcggcccgggttcgattcccggtcagggaatga

SEQ ID NO: 34277 - DNA, 19 bp, Artificial Sequence
  Probe
tcacctggagcatgttttc

SEQ ID NO: 34278 - DNA, 20 bp, Artificial Sequence
  Probe
tcacctggagcatgttttct

SEQ ID NO: 34279 - DNA, 21 bp, Artificial Sequence
  Probe
tcacctggagcatgttttctt

SEQ ID NO: 34280 - DNA, 22 bp, Artificial Sequence
  Probe
tcacctggagcatgttttcttc

SEQ ID NO: 34281 - DNA, 15 bp, Artificial Sequence
  Probe
tcacgcgggagaccg

SEQ ID NO: 34282 - DNA, 29 bp, Artificial Sequence
  Probe
tcacgcgggagaccggggttcgattcccc

SEQ ID NO: 34283 - DNA, 30 bp, Artificial Sequence
  Probe
tcacgcgggagaccggggttcgattccccg

SEQ ID NO: 34284 - DNA, 34 bp, Artificial Sequence; identical to SEQ ID NO: 1620
  Probe

SEQ ID NO: 34285 - DNA, 35 bp, Artificial Sequence; identical to SEQ ID NO: 1621
  Probe

SEQ ID NO: 34286 - DNA, 39 bp, Artificial Sequence; identical to SEQ ID NO: 7699
  Probe

SEQ ID NO: 34287 - DNA, 40 bp, Artificial Sequence; identical to SEQ ID NO: 7706
  Probe

SEQ ID NO: 34288 - DNA, 41 bp, Artificial Sequence; identical to SEQ ID NO: 7707
  Probe

SEQ ID NO: 34289 - DNA, 39 bp, Artificial Sequence; identical to SEQ ID NO: 7711
  Probe

SEQ ID NO: 34290 - DNA, 40 bp, Artificial Sequence; identical to SEQ ID NO: 7715
  Probe

SEQ ID NO: 34291 - DNA, 41 bp, Artificial Sequence; identical to SEQ ID NO: 7716
  Probe

SEQ ID NO: 34292 - DNA, 36 bp, Artificial Sequence
  Probe
tcacggcattgtgaggacaatggcacggcaagggga

SEQ ID NO: 34293 - DNA, 25 bp, Artificial Sequence
  Probe
tcacgtcggggtcaaacaaaacatt

SEQ ID NO: 34294 - DNA, 26 bp, Artificial Sequence
  Probe
tcacgtcggggtcaaacaaaacattg

SEQ ID NO: 34295 - DNA, 27 bp, Artificial Sequence
  Probe
tcacgtcggggtcaaacaaaacattgt

SEQ ID NO: 34296 - DNA, 28 bp, Artificial Sequence
  Probe
tcacgtcggggtcaaacaaaacattgtt

SEQ ID NO: 34297 - DNA, 29 bp, Artificial Sequence
  Probe
tcacgtcggggtcaaacaaaacattgttt

SEQ ID NO: 34298 - DNA, 18 bp, Artificial Sequence
  Probe
tcacgtctgctttacacg

SEQ ID NO: 34299 - DNA, 36 bp, Artificial Sequence
  Probe
tcagaagattccaggttcgactcctggctggctcgg

SEQ ID NO: 34300 - DNA, 36 bp, Artificial Sequence
  Probe
tcagaagattccaggttcgactcctggctggctcgt

SEQ ID NO: 34301 - DNA, 36 bp, Artificial Sequence
  Probe
tcagaagattctaggttcgactcctggctggctcgc

SEQ ID NO: 34302 - DNA, 38 bp, Artificial Sequence; identical to SEQ ID NO: 7729
  Probe

SEQ ID NO: 34303 - DNA, 36 bp, Artificial Sequence
  Probe
tcagaagattgagggttcgagtcccttcgtggtcgg

SEQ ID NO: 34304 - DNA, 36 bp, Artificial Sequence
  Probe
tcagaagattgagggttcgagtcccttcgtggtcgt

SEQ ID NO: 34305 - DNA, 36 bp, Artificial Sequence
  Probe
tcagaagattgcaggttcgagtcctgccgcggtcga

SEQ ID NO: 34306 - DNA, 15 bp, Artificial Sequence
  Probe
tcagaaggctgcgtg

SEQ ID NO: 34307 - DNA, 16 bp, Artificial Sequence
  Probe
tcagaaggctgcgtgt

SEQ ID NO: 34308 - DNA, 17 bp, Artificial Sequence
  Probe
tcagaaggctgcgtgtt

SEQ ID NO: 34309 - DNA, 18 bp, Artificial Sequence
  Probe
tcagaaggctgcgtgttc

SEQ ID NO: 34310 - DNA, 36 bp, Artificial Sequence
  Probe
tcagaaggctgcgtgttcgaatcacgtcggggtcaa

SEQ ID NO: 34311 - DNA, 15 bp, Artificial Sequence
  Probe
tcagaaggtctcact

SEQ ID NO: 34312 - DNA, 16 bp, Artificial Sequence
  Probe
tcagaaggtctcactt

SEQ ID NO: 34313 - DNA, 17 bp, Artificial Sequence
  Probe
tcagaaggtctcacttt

SEQ ID NO: 34314 - DNA, 18 bp, Artificial Sequence
  Probe
tcagaaggtctcactttt

SEQ ID NO: 34315 - DNA, 28 bp, Artificial Sequence
  Probe
tcagagaaaaagtctttaactccaccat

SEQ ID NO: 34316 - DNA, 27 bp, Artificial Sequence
  Probe
tcagattgtgaatctgacaacagaggc

SEQ ID NO: 34317 - DNA, 28 bp, Artificial Sequence
  Probe
tcagattgtgaatctgacaacagaggct

SEQ ID NO: 34318 - DNA, 29 bp, Artificial Sequence
  Probe
tcagattgtgaatctgacaacagaggctt

SEQ ID NO: 34319 - DNA, 33 bp, Artificial Sequence
  Probe
tcagattgtgaatctgacaacagaggcttacga

SEQ ID NO: 34320 - DNA, 34 bp, Artificial Sequence
  Probe
tcagattgtgaatctgacaacagaggcttacgac

SEQ ID NO: 34321 - DNA, 35 bp, Artificial Sequence
  Probe
tcagattgtgaatctgacaacagaggcttacgacc

SEQ ID NO: 34322 - DNA, 37 bp, Artificial Sequence
  Probe
tcagattgtgaatctgacaacagaggcttacgacccc

SEQ ID NO: 34323 - DNA, 22 bp, Artificial Sequence
  Probe
tcagctaaataagctatcgggc

SEQ ID NO: 34324 - DNA, 23 bp, Artificial Sequence
  Probe
tcagctaaataagctatcgggcc

SEQ ID NO: 34325 - DNA, 24 bp, Artificial Sequence
  Probe
tcagctaaataagctatcgggccc

SEQ ID NO: 34326 - DNA, 25 bp, Artificial Sequence
  Probe
tcagctaaataagctatcgggccca

SEQ ID NO: 34327 - DNA, 26 bp, Artificial Sequence
  Probe
tcagctaaataagctatcgggcccat

SEQ ID NO: 34328 - DNA, 27 bp, Artificial Sequence
  Probe
tcagctaaataagctatcgggcccata

SEQ ID NO: 34329 - DNA, 29 bp, Artificial Sequence
  Probe
tcagctaaataagctatcgggcccatacc

SEQ ID NO: 34330 - DNA, 36 bp, Artificial Sequence; identical to SEQ ID NO: 7736
  Probe

SEQ ID NO: 34331 - DNA, 18 bp, Artificial Sequence
  Probe
tcagctatagggtggaga

SEQ ID NO: 34332 - DNA, 15 bp, Artificial Sequence
  Probe
tcaggatggccgagc

SEQ ID NO: 34333 - DNA, 24 bp, Artificial Sequence
  Probe
tcaggatggccgagcggtctaagg

SEQ ID NO: 34334 - DNA, 19 bp, Artificial Sequence
  Probe
tcagggatgggttcgattc

SEQ ID NO: 34335 - DNA, 21 bp, Artificial Sequence
  Probe
tcagggatgggttcgattctc

SEQ ID NO: 34336 - DNA, 29 bp, Artificial Sequence
  Probe
tcagggatgggttcgattctcatagtcct

SEQ ID NO: 34337 - DNA, 36 bp, Artificial Sequence
  Probe
tcaggggcccggatagctcagtcggtagagcatcag

SEQ ID NO: 34338 - DNA, 15 bp, Artificial Sequence
  Probe
tcagtcggtagagca

SEQ ID NO: 34339 - DNA, 18 bp, Artificial Sequence
  Probe
tcagtcggtagagcatca

SEQ ID NO: 34340 - DNA, 20 bp, Artificial Sequence
  Probe
tcagtcggtagagcatcaga

SEQ ID NO: 34341 - DNA, 22 bp, Artificial Sequence
  Probe
tcagtcggtagagcatcagact

SEQ ID NO: 34342 - DNA, 24 bp, Artificial Sequence
  Probe
tcagtcggtagagcatcagacttt

SEQ ID NO: 34343 - DNA, 26 bp, Artificial Sequence
  Probe
tcagtcggtagagcatcagactttta

SEQ ID NO: 34344 - DNA, 21 bp, Artificial Sequence
  Probe
tcagtcggtagagcatgagac

SEQ ID NO: 34345 - DNA, 22 bp, Artificial Sequence
  Probe
tcagtcggtagagcatgagact

SEQ ID NO: 34346 - DNA, 36 bp, Artificial Sequence
  Probe
tcagtcggtagagcatgagactcttaatctcagggt

SEQ ID NO: 34347 - DNA, 21 bp, Artificial Sequence
  Probe
tcagtcggtagagcatgggac

SEQ ID NO: 34348 - DNA, 23 bp, Artificial Sequence
  Probe
tcagtcggtagagcatgggactc

SEQ ID NO: 34349 - DNA, 31 bp, Artificial Sequence
  Probe
tcagtcggtagagcatgggactcttaatccc

SEQ ID NO: 34350 - DNA, 19 bp, Artificial Sequence
  Probe
tcagtggtagaattctcgc

SEQ ID NO: 34351 - DNA, 20 bp, Artificial Sequence
  Probe
tcagtggtagaattctcgcc

SEQ ID NO: 34352 - DNA, 21 bp, Artificial Sequence
  Probe
tcagtggtagaattctcgcct

SEQ ID NO: 34353 - DNA, 23 bp, Artificial Sequence
  Probe
tcagtggtagaattctcgcctgc

SEQ ID NO: 34354 - DNA, 24 bp, Artificial Sequence
  Probe
tcagtggtagaattctcgcctgcc

SEQ ID NO: 34355 - DNA, 36 bp, Artificial Sequence
  Probe
tcagtggtagaattctcgcctgccacgcgggaggcc

SEQ ID NO: 34356 - DNA, 36 bp, Artificial Sequence; identical to SEQ ID NO: 23728
  Probe

SEQ ID NO: 34357 - DNA, 31 bp, Artificial Sequence
  Probe
tcataactttgtcaaagttaaattataggct

SEQ ID NO: 34358 - DNA, 22 bp, Artificial Sequence
  Probe
tcataatctgaaggtcctgagt

SEQ ID NO: 34359 - DNA, 36 bp, Artificial Sequence
  Probe
tcataatctgaaggtcgtgagttcgagcctcacacg

SEQ ID NO: 34360 - DNA, 36 bp, Artificial Sequence
  Probe
tcataatctgaaggtcgtgagttcgatcctcacacg

SEQ ID NO: 34361 - DNA, 27 bp, Artificial Sequence
  Probe
tcatatcattggtcgtggttgtagtcc

SEQ ID NO: 34362 - DNA, 32 bp, Artificial Sequence; identical to SEQ ID NO: 7748
  Probe

SEQ ID NO: 34363 - DNA, 35 bp, Artificial Sequence
  Probe
tcatatcattggtcgtggttgtagtccgtgcgaga

SEQ ID NO: 34364 - DNA, 37 bp, Artificial Sequence
  Probe
tcatatcattggtcgtggttgtagtccgtgcgagaat

SEQ ID NO: 34365 - DNA, 38 bp, Artificial Sequence; identical to SEQ ID NO: 14239
  Probe

SEQ ID NO: 34366 - DNA, 40 bp, Artificial Sequence; identical to SEQ ID NO: 7750
  Probe

SEQ ID NO: 34367 - DNA, 15 bp, Artificial Sequence
  Probe
tcatattgaattgca

SEQ ID NO: 34368 - DNA, 36 bp, Artificial Sequence
  Probe
tcatattgaattgcaaattcgaagaagcagcttcaa

SEQ ID NO: 34369 - DNA, 36 bp, Artificial Sequence; identical to SEQ ID NO: 7767
  Probe

SEQ ID NO: 34370 - DNA, 18 bp, Artificial Sequence
  Probe
tcattggtcgtggttgta

SEQ ID NO: 34371 - DNA, 23 bp, Artificial Sequence
  Probe
tcattggtcgtggttgtagtccg

SEQ ID NO: 34372 - DNA, 25 bp, Artificial Sequence
  Probe
tcattggtcgtggttgtagtccgtg

SEQ ID NO: 34373 - DNA, 27 bp, Artificial Sequence
  Probe
tcattggtcgtggttgtagtccgtgcg

SEQ ID NO: 34374 - DNA, 36 bp, Artificial Sequence
  Probe
tcattggtcgtggttgtagtccgtgcgagaataatg

SEQ ID NO: 34375 - DNA, 18 bp, Artificial Sequence
  Probe
tccaatggaggcgtgggt

SEQ ID NO: 34376 - DNA, 36 bp, Artificial Sequence
  Probe
tccaatggaggcgtgggttcgaatcccacttctgac

SEQ ID NO: 34377 - DNA, 40 bp, Artificial Sequence
  Probe
tccaatggaggcgtgggttcgaatcccacttctgacacaa

SEQ ID NO: 34378 - DNA, 20 bp, Artificial Sequence
  Probe
tccaattaactagttttgac

SEQ ID NO: 34379 - DNA, 27 bp, Artificial Sequence
  Probe
tccagggttcaagtccctgttcgggcg

SEQ ID NO: 34380 - DNA, 28 bp, Artificial Sequence
  Probe
tccagggttcaagtccctgttcgggcgg

SEQ ID NO: 34381 - DNA, 28 bp, Artificial Sequence
  Probe
tccagggttcaagtccctgttcgggcgt

SEQ ID NO: 34382 - DNA, 36 bp, Artificial Sequence
  Probe
tccatggtgtaatggttagcactctggactctgaat

SEQ ID NO: 34383 - DNA, 25 bp, Artificial Sequence
  Probe
tccattggggtttccccgcgcaggt

SEQ ID NO: 34384 - DNA, 35 bp, Artificial Sequence
  Probe
tccattggggtttccccgcgcaggttcgaatcctg

SEQ ID NO: 34385 - DNA, 36 bp, Artificial Sequence
  Probe
tccattggggtttccccgcgcaggttcgaatcctgc

SEQ ID NO: 34386 - DNA, 36 bp, Artificial Sequence
  Probe
tccattggggtttccccgcgcaggttcgaatcctgt

SEQ ID NO: 34387 - DNA, 17 bp, Artificial Sequence
  Probe
tccattggtcttaggcc

SEQ ID NO: 34388 - DNA, 20 bp, Artificial Sequence
  Probe
tccattggtcttaggcccca

SEQ ID NO: 34389 - DNA, 36 bp, Artificial Sequence
  Probe
tccattggtcttaggccccaaaaattttggtgcaac

SEQ ID NO: 34390 - DNA, 36 bp, Artificial Sequence
  Probe
tccattgtgctttgcacgcgtgggttcgaatcccat

SEQ ID NO: 34391 - DNA, 15 bp, Artificial Sequence
  Probe
tcccacatggtctag

SEQ ID NO: 34392 - DNA, 16 bp, Artificial Sequence
  Probe
tcccacatggtctagc

SEQ ID NO: 34393 - DNA, 17 bp, Artificial Sequence
  Probe
tcccacatggtctagcg

SEQ ID NO: 34394 - DNA, 22 bp, Artificial Sequence
  Probe
tcccacatggtctagcggttag

SEQ ID NO: 34395 - DNA, 27 bp, Artificial Sequence
  Probe
tcccacatggtctagcggttaggattc

SEQ ID NO: 34396 - DNA, 37 bp, Artificial Sequence; identical to SEQ ID NO: 1650
  Probe

SEQ ID NO: 34397 - DNA, 27 bp, Artificial Sequence
  Probe
tcccacccagggacggaagtcgcattt

SEQ ID NO: 34398 - DNA, 15 bp, Artificial Sequence
  Probe
tcccaccgctgccac

SEQ ID NO: 34399 - DNA, 15 bp, Artificial Sequence
  Probe
tcccacttctgacac

SEQ ID NO: 34400 - DNA, 36 bp, Artificial Sequence
  Probe
tcccagggtcgtgggttcgagccccacgttgggcgc

SEQ ID NO: 34401 - DNA, 16 bp, Artificial Sequence
  Probe
tcccatatggtctagc

SEQ ID NO: 34402 - DNA, 26 bp, Artificial Sequence
  Probe
tcccatatggtctagcggttaggatt

SEQ ID NO: 34403 - DNA, 31 bp, Artificial Sequence; identical to SEQ ID NO: 1660
  Probe

SEQ ID NO: 34404 - DNA, 34 bp, Artificial Sequence; identical to SEQ ID NO: 1663
  Probe

SEQ ID NO: 34405 - DNA, 35 bp, Artificial Sequence; identical to SEQ ID NO: 1664
  Probe

SEQ ID NO: 34406 - DNA, 37 bp, Artificial Sequence; identical to SEQ ID NO: 1666
  Probe

SEQ ID NO: 34407 - DNA, 15 bp, Artificial Sequence
  Probe
tcccatcctcgtcgc

SEQ ID NO: 34408 - DNA, 36 bp, Artificial Sequence
  Probe
tcccatggtgtaatggttagcactctggactttgaa

SEQ ID NO: 34409 - DNA, 50 bp, Artificial Sequence
  Probe
tcccatggtgtaatggttagcactctggactttgaatccagcgatccgag

SEQ ID NO: 34410 - DNA, 15 bp, Artificial Sequence
  Probe
tccccagtacctcca

SEQ ID NO: 34411 - DNA, 15 bp, Artificial Sequence
  Probe
tccccggcacctcca

SEQ ID NO: 34412 - DNA, 16 bp, Artificial Sequence
  Probe
tccccggcacctccaa

SEQ ID NO: 34413 - DNA, 17 bp, Artificial Sequence
  Probe
tccccggcacctccaaa

SEQ ID NO: 34414 - DNA, 19 bp, Artificial Sequence
  Probe
tccccggcacctccaccag

SEQ ID NO: 34415 - DNA, 20 bp, Artificial Sequence
  Probe
tccccggcacctccaccagt

SEQ ID NO: 34416 - DNA, 21 bp, Artificial Sequence
  Probe
tccccggcacctccaccagtt

SEQ ID NO: 34417 - DNA, 22 bp, Artificial Sequence
  Probe
tccccggcacctccaccagttt

SEQ ID NO: 34418 - DNA, 18 bp, Artificial Sequence
  Probe
tccccggcacctccagct

SEQ ID NO: 34419 - DNA, 17 bp, Artificial Sequence
  Probe
tccccggcacctccatt

SEQ ID NO: 34420 - DNA, 15 bp, Artificial Sequence
  Probe
tccccggcatctcca

SEQ ID NO: 34421 - DNA, 25 bp, Artificial Sequence
  Probe
tccccggcatctccattgtagtttt

SEQ ID NO: 34422 - DNA, 15 bp, Artificial Sequence
  Probe
tccccgtacgggcca

SEQ ID NO: 34423 - DNA, 25 bp, Artificial Sequence
  Probe
tccccgtacgggccaactttgtttt

SEQ ID NO: 34424 - DNA, 16 bp, Artificial Sequence
  Probe
tccccgtacgggccac

SEQ ID NO: 34425 - DNA, 18 bp, Artificial Sequence
  Probe
tccccgtacgggccacga

SEQ ID NO: 34426 - DNA, 26 bp, Artificial Sequence
  Probe
tccccgtacgggccaggattgaaact

SEQ ID NO: 34427 - DNA, 27 bp, Artificial Sequence
  Probe
tccccgtacgggccaggattgaaactt

SEQ ID NO: 34428 - DNA, 28 bp, Artificial Sequence
  Probe
tccccgtacgggccaggattgaaacttt

SEQ ID NO: 34429 - DNA, 29 bp, Artificial Sequence
  Probe
tccccgtacgggccaggattgaaactttt

SEQ ID NO: 34430 - DNA, 15 bp, Artificial Sequence
  Probe
tcccctggcccaacc

SEQ ID NO: 34431 - DNA, 16 bp, Artificial Sequence
  Probe
tcccctggcccaaccc

SEQ ID NO: 34432 - DNA, 25 bp, Artificial Sequence
  Probe
tcccctggcccaacccgtcatctac

SEQ ID NO: 34433 - DNA, 15 bp, Artificial Sequence
  Probe
tcccgccttttttcc

SEQ ID NO: 34434 - DNA, 16 bp, Artificial Sequence
  Probe
tcccgccttttttccc

SEQ ID NO: 34435 - DNA, 17 bp, Artificial Sequence
  Probe
tcccgccttttttcccg

SEQ ID NO: 34436 - DNA, 18 bp, Artificial Sequence
  Probe
tcccgccttttttcccgg

SEQ ID NO: 34437 - DNA, 19 bp, Artificial Sequence
  Probe
tcccgccttttttcccggc

SEQ ID NO: 34438 - DNA, 20 bp, Artificial Sequence
  Probe
tcccgccttttttcccggcg

SEQ ID NO: 34439 - DNA, 23 bp, Artificial Sequence
  Probe
tcccgccttttttcccggcggcg

SEQ ID NO: 34440 - DNA, 24 bp, Artificial Sequence
  Probe
tcccgccttttttcccggcggcgg

SEQ ID NO: 34441 - DNA, 25 bp, Artificial Sequence
  Probe
tcccgccttttttcccggcggcggg

SEQ ID NO: 34442 - DNA, 27 bp, Artificial Sequence
  Probe
tcccgccttttttcccggcggcgggag

SEQ ID NO: 34443 - DNA, 29 bp, Artificial Sequence
  Probe
tcccgccttttttcccggcggcgggagaa

SEQ ID NO: 34444 - DNA, 15 bp, Artificial Sequence
  Probe
tcccggacgagccca

SEQ ID NO: 34445 - DNA, 16 bp, Artificial Sequence
  Probe
tcccggacgagcccac

SEQ ID NO: 34446 - DNA, 17 bp, Artificial Sequence
  Probe
tcccggacgagcccaca

SEQ ID NO: 34447 - DNA, 17 bp, Artificial Sequence
  Probe
tcccggacgagcccact

SEQ ID NO: 34448 - DNA, 21 bp, Artificial Sequence
  Probe
tcccggacgagcccaggcttt

SEQ ID NO: 34449 - DNA, 15 bp, Artificial Sequence
  Probe
tcccggacgagcccc

SEQ ID NO: 34450 - DNA, 16 bp, Artificial Sequence
  Probe
tcccggacgagccccc

SEQ ID NO: 34451 - DNA, 17 bp, Artificial Sequence
  Probe
tcccggacgagccccct

SEQ ID NO: 34452 - DNA, 16 bp, Artificial Sequence
  Probe
tcccggacgagcccct

SEQ ID NO: 34453 - DNA, 17 bp, Artificial Sequence
  Probe
tcccggacgagcccctc

SEQ ID NO: 34454 - DNA, 17 bp, Artificial Sequence
  Probe
tcccggacgagcccctt

SEQ ID NO: 34455 - DNA, 15 bp, Artificial Sequence
  Probe
tcccggacgagcccg

SEQ ID NO: 34456 - DNA, 17 bp, Artificial Sequence
  Probe
tcccggacgagcccgct

SEQ ID NO: 34457 - DNA, 15 bp, Artificial Sequence
  Probe
tcccggacgagccct

SEQ ID NO: 34458 - DNA, 16 bp, Artificial Sequence
  Probe
tcccggacgagcccta

SEQ ID NO: 34459 - DNA, 16 bp, Artificial Sequence
  Probe
tcccggacgagccctc

SEQ ID NO: 34460 - DNA, 17 bp, Artificial Sequence
  Probe
tcccggacgagccctca

SEQ ID NO: 34461 - DNA, 18 bp, Artificial Sequence
  Probe
tcccggacgagccctcat

SEQ ID NO: 34462 - DNA, 19 bp, Artificial Sequence
  Probe
tcccggacgagccctcatt

SEQ ID NO: 34463 - DNA, 20 bp, Artificial Sequence
  Probe
tcccggacgagccctcattt

SEQ ID NO: 34464 - DNA, 21 bp, Artificial Sequence
  Probe
tcccggacgagccctcatttt

SEQ ID NO: 34465 - DNA, 23 bp, Artificial Sequence
  Probe
tcccggacgagccctcattttct

SEQ ID NO: 34466 - DNA, 16 bp, Artificial Sequence
  Probe
tcccggacgagccctg

SEQ ID NO: 34467 - DNA, 17 bp, Artificial Sequence
  Probe
tcccggacgagccctgt

SEQ ID NO: 34468 - DNA, 18 bp, Artificial Sequence
  Probe
tcccggacgagccctgtt

SEQ ID NO: 34469 - DNA, 19 bp, Artificial Sequence
  Probe
tcccggacgagccctgttt

SEQ ID NO: 34470 - DNA, 25 bp, Artificial Sequence
  Probe
tcccggccaatgcaacgatgacgtt

SEQ ID NO: 34471 - DNA, 26 bp, Artificial Sequence
  Probe
tcccggccaatgcaacgatgacgttt

SEQ ID NO: 34472 - DNA, 27 bp, Artificial Sequence
  Probe
tcccggccaatgcaacgatgacgtttt

SEQ ID NO: 34473 - DNA, 28 bp, Artificial Sequence
  Probe
tcccggccaatgcaacgatgacgtttta

SEQ ID NO: 34474 - DNA, 15 bp, Artificial Sequence
  Probe
tcccggccaatgcac

SEQ ID NO: 34475 - DNA, 15 bp, Artificial Sequence
  Probe
tcccgggcggcgcac

SEQ ID NO: 34476 - DNA, 16 bp, Artificial Sequence
  Probe
tcccgggcggcgcact

SEQ ID NO: 34477 - DNA, 15 bp, Artificial Sequence
  Probe
tcccgggtttcggca

SEQ ID NO: 34478 - DNA, 16 bp, Artificial Sequence
  Probe
tcccgggtttcggcac

SEQ ID NO: 34479 - DNA, 17 bp, Artificial Sequence
  Probe
tcccgggtttcggcact

SEQ ID NO: 34480 - DNA, 18 bp, Artificial Sequence
  Probe
tcccgggtttcggcagcg

SEQ ID NO: 34481 - DNA, 15 bp, Artificial Sequence
  Probe
tcccggtcagggaac

SEQ ID NO: 34482 - DNA, 16 bp, Artificial Sequence
  Probe
tcccggtcagggaacc

SEQ ID NO: 34483 - DNA, 17 bp, Artificial Sequence
  Probe
tcccggtcagggaacca

SEQ ID NO: 34484 - DNA, 16 bp, Artificial Sequence
  Probe
tcccggtgtgggaacg

SEQ ID NO: 34485 - DNA, 15 bp, Artificial Sequence
  Probe
tccctggtagtctag

SEQ ID NO: 34486 - DNA, 15 bp, Artificial Sequence
  Probe
tccctggtggtctag

SEQ ID NO: 34487 - DNA, 16 bp, Artificial Sequence
  Probe
tccctggtggtctagt

SEQ ID NO: 34488 - DNA, 17 bp, Artificial Sequence
  Probe
tccctggtggtctagtg

SEQ ID NO: 34489 - DNA, 19 bp, Artificial Sequence
  Probe
tccctggtggtctagtggc

SEQ ID NO: 34490 - DNA, 20 bp, Artificial Sequence
  Probe
tccctggtggtctagtggct

SEQ ID NO: 34491 - DNA, 23 bp, Artificial Sequence
  Probe
tccctggtggtctagtggctagg

SEQ ID NO: 34492 - DNA, 25 bp, Artificial Sequence
  Probe
tccctggtggtctagtggctaggat

SEQ ID NO: 34493 - DNA, 26 bp, Artificial Sequence
  Probe
tccctggtggtctagtggctaggatt

SEQ ID NO: 34494 - DNA, 28 bp, Artificial Sequence
  Probe
tccctggtggtctagtggctaggattcg

SEQ ID NO: 34495 - DNA, 29 bp, Artificial Sequence
  Probe
tccctggtggtctagtggctaggattcgg

SEQ ID NO: 34496 - DNA, 30 bp, Artificial Sequence; identical to SEQ ID NO: 7856
  Probe

SEQ ID NO: 34497 - DNA, 37 bp, Artificial Sequence; identical to SEQ ID NO: 1677
  Probe

SEQ ID NO: 34498 - DNA, 19 bp, Artificial Sequence
  Probe
tccctggtggtctagtggt

SEQ ID NO: 34499 - DNA, 23 bp, Artificial Sequence
  Probe
tccctggtggtctagtggttagg

SEQ ID NO: 34500 - DNA, 24 bp, Artificial Sequence
  Probe
tccctggtggtctagtggttagga

SEQ ID NO: 34501 - DNA, 25 bp, Artificial Sequence
  Probe
tccctggtggtctagtggttaggat

SEQ ID NO: 34502 - DNA, 26 bp, Artificial Sequence
  Probe
tccctggtggtctagtggttaggatt

SEQ ID NO: 34503 - DNA, 27 bp, Artificial Sequence
  Probe
tccctggtggtctagtggttaggattc

SEQ ID NO: 34504 - DNA, 28 bp, Artificial Sequence
  Probe
tccctggtggtctagtggttaggattcg

SEQ ID NO: 34505 - DNA, 29 bp, Artificial Sequence
  Probe
tccctggtggtctagtggttaggattcgg

SEQ ID NO: 34506 - DNA, 30 bp, Artificial Sequence; identical to SEQ ID NO: 7870
  Probe

SEQ ID NO: 34507 - DNA, 38 bp, Artificial Sequence; identical to SEQ ID NO: 1686
  Probe

SEQ ID NO: 34508 - DNA, 40 bp, Artificial Sequence; identical to SEQ ID NO: 1688
  Probe

SEQ ID NO: 34509 - DNA, 42 bp, Artificial Sequence; identical to SEQ ID NO: 1689
  Probe

SEQ ID NO: 34510 - DNA, 15 bp, Artificial Sequence
  Probe
tccctgtccaggcgc

SEQ ID NO: 34511 - DNA, 17 bp, Artificial Sequence
  Probe
tccctgtccaggcgcta

SEQ ID NO: 34512 - DNA, 17 bp, Artificial Sequence
  Probe
tccctgttcgggcggca

SEQ ID NO: 34513 - DNA, 15 bp, Artificial Sequence
  Probe
tccctgttcgggcgt

SEQ ID NO: 34514 - DNA, 19 bp, Artificial Sequence
  Probe
tccggatggaggcgtgggt

SEQ ID NO: 34515 - DNA, 36 bp, Artificial Sequence
  Probe
tccggatggaggcgtgggttcgaatcccacttctga

SEQ ID NO: 34516 - DNA, 16 bp, Artificial Sequence
  Probe
tccggctcgaaggaag

SEQ ID NO: 34517 - DNA, 15 bp, Artificial Sequence
  Probe
tccggctcgaaggac

SEQ ID NO: 34518 - DNA, 16 bp, Artificial Sequence
  Probe
tccggctcgaaggacg

SEQ ID NO: 34519 - DNA, 17 bp, Artificial Sequence
  Probe
tccggctcgaaggacga

SEQ ID NO: 34520 - DNA, 16 bp, Artificial Sequence
  Probe
tccggctcgaaggact

SEQ ID NO: 34521 - DNA, 17 bp, Artificial Sequence
  Probe
tccggctcgaaggactt

SEQ ID NO: 34522 - DNA, 21 bp, Artificial Sequence
  Probe
tccggctcgaaggacttcgtc

SEQ ID NO: 34523 - DNA, 16 bp, Artificial Sequence
  Probe
tccggctcgaaggagc

SEQ ID NO: 34524 - DNA, 15 bp, Artificial Sequence
  Probe
tccggctcggaggac

SEQ ID NO: 34525 - DNA, 16 bp, Artificial Sequence
  Probe
tccggctcggaggacg

SEQ ID NO: 34526 - DNA, 15 bp, Artificial Sequence
  Probe
tccgggtgccccctc

SEQ ID NO: 34527 - DNA, 16 bp, Artificial Sequence
  Probe
tccgggtgccccctca

SEQ ID NO: 34528 - DNA, 17 bp, Artificial Sequence
  Probe
tccgggtgccccctcaa

SEQ ID NO: 34529 - DNA, 16 bp, Artificial Sequence
  Probe
tccgggtgccccctcg

SEQ ID NO: 34530 - DNA, 16 bp, Artificial Sequence
  Probe
tccgggtgccccctct

SEQ ID NO: 34531 - DNA, 30 bp, Artificial Sequence; identical to SEQ ID NO: 23951
  Probe

SEQ ID NO: 34532 - DNA, 29 bp, Artificial Sequence
  Probe
tccgtagtgtagcggttatcacattcgcc

SEQ ID NO: 34533 - DNA, 30 bp, Artificial Sequence; identical to SEQ ID NO: 7878
  Probe

SEQ ID NO: 34534 - DNA, 32 bp, Artificial Sequence; identical to SEQ ID NO: 7880
  Probe

SEQ ID NO: 34535 - DNA, 31 bp, Artificial Sequence; identical to SEQ ID NO: 7884
  Probe

SEQ ID NO: 34536 - DNA, 32 bp, Artificial Sequence; identical to SEQ ID NO: 7885
  Probe

SEQ ID NO: 34537 - DNA, 33 bp, Artificial Sequence; identical to SEQ ID NO: 7886
  Probe

SEQ ID NO: 34538 - DNA, 20 bp, Artificial Sequence
  Probe
tccgtagtgtagtggttatc

SEQ ID NO: 34539 - DNA, 29 bp, Artificial Sequence
  Probe
tccgtagtgtagtggttatcacgttcgcc

SEQ ID NO: 34540 - DNA, 30 bp, Artificial Sequence; identical to SEQ ID NO: 7893
  Probe

SEQ ID NO: 34541 - DNA, 36 bp, Artificial Sequence
  Probe
tccgtagtgtagtggttatcacgttcgcctaacacg

SEQ ID NO: 34542 - DNA, 31 bp, Artificial Sequence; identical to SEQ ID NO: 7895
  Probe

SEQ ID NO: 34543 - DNA, 32 bp, Artificial Sequence; identical to SEQ ID NO: 7896
  Probe

SEQ ID NO: 34544 - DNA, 33 bp, Artificial Sequence; identical to SEQ ID NO: 7897
  Probe

SEQ ID NO: 34545 - DNA, 36 bp, Artificial Sequence; identical to SEQ ID NO: 23970
  Probe

SEQ ID NO: 34546 - DNA, 32 bp, Artificial Sequence
  Probe
tccgtggtggtctagtggctaggattcggcgc

SEQ ID NO: 34547 - DNA, 33 bp, Artificial Sequence; identical to SEQ ID NO: 7900
  Probe

SEQ ID NO: 34548 - DNA, 29 bp, Artificial Sequence
  Probe
tccgtggtgtagtggttatcacattcgcc

SEQ ID NO: 34549 - DNA, 30 bp, Artificial Sequence; identical to SEQ ID NO: 23977
  Probe

SEQ ID NO: 34550 - DNA, 22 bp, Artificial Sequence
  Probe
tcctaagccagggattgtgggt

SEQ ID NO: 34551 - DNA, 36 bp, Artificial Sequence
  Probe
tcctaagccagggattgtgggttcgagtcccatctg

SEQ ID NO: 34552 - DNA, 19 bp, Artificial Sequence
  Probe
tcctcaaagcaatacactg

SEQ ID NO: 34553 - DNA, 36 bp, Artificial Sequence
  Probe
tcctcaaagcaatacactgaaaatgtttagacgggc

SEQ ID NO: 34554 - DNA, 16 bp, Artificial Sequence
  Probe
tcctcgctggggcctc

SEQ ID NO: 34555 - DNA, 18 bp, Artificial Sequence
  Probe
tcctcgctggggcctcct

SEQ ID NO: 34556 - DNA, 15 bp, Artificial Sequence
  Probe
tcctcgttagtatag

SEQ ID NO: 34557 - DNA, 16 bp, Artificial Sequence
  Probe
tcctcgttagtatagt

SEQ ID NO: 34558 - DNA, 17 bp, Artificial Sequence
  Probe
tcctcgttagtatagtg

SEQ ID NO: 34559 - DNA, 28 bp, Artificial Sequence
  Probe
tcctcgttagtatagtggtgagtatccc

SEQ ID NO: 34560 - DNA, 29 bp, Artificial Sequence
  Probe
tcctcgttagtatagtggtgagtatcccc

SEQ ID NO: 34561 - DNA, 30 bp, Artificial Sequence; identical to SEQ ID NO: 1701
  Probe

SEQ ID NO: 34562 - DNA, 31 bp, Artificial Sequence; identical to SEQ ID NO: 1702
  Probe

SEQ ID NO: 34563 - DNA, 34 bp, Artificial Sequence; identical to SEQ ID NO: 1705
  Probe

SEQ ID NO: 34564 - DNA, 35 bp, Artificial Sequence; identical to SEQ ID NO: 1706
  Probe

SEQ ID NO: 34565 - DNA, 50 bp, Artificial Sequence; identical to SEQ ID NO: 1711
  Probe

SEQ ID NO: 34566 - DNA, 33 bp, Artificial Sequence; identical to SEQ ID NO: 1715
  Probe

SEQ ID NO: 34567 - DNA, 36 bp, Artificial Sequence; identical to SEQ ID NO: 1718
  Probe

SEQ ID NO: 34568 - DNA, 22 bp, Artificial Sequence
  Probe
tcctgctcacagcgtcactagt

SEQ ID NO: 34569 - DNA, 23 bp, Artificial Sequence
  Probe
tcctgctcacagcgtcactagtt

SEQ ID NO: 34570 - DNA, 24 bp, Artificial Sequence
  Probe
tcctgctcacagcgtcactagttt

SEQ ID NO: 34571 - DNA, 25 bp, Artificial Sequence
  Probe
tcctgctcacagcgtcactagtttt

SEQ ID NO: 34572 - DNA, 15 bp, Artificial Sequence
  Probe
tcctggctggctcgc

SEQ ID NO: 34573 - DNA, 17 bp, Artificial Sequence
  Probe
tcctggctggctcgctt

SEQ ID NO: 34574 - DNA, 36 bp, Artificial Sequence
  Probe
tcctggttttcacccaggcggcccgggttcgactcc

SEQ ID NO: 34575 - DNA, 16 bp, Artificial Sequence
  Probe
tccttaggtcgctggt

SEQ ID NO: 34576 - DNA, 17 bp, Artificial Sequence
  Probe
tccttaggtcgctggtt

SEQ ID NO: 34577 - DNA, 30 bp, Artificial Sequence; identical to SEQ ID NO: 24012
  Probe

SEQ ID NO: 34578 - DNA, 36 bp, Artificial Sequence
  Probe
tccttaggtcgctggttcgattccggctcgaaggac

SEQ ID NO: 34579 - DNA, 36 bp, Artificial Sequence
  Probe
tccttaggtcgctggttcgattccggctcgaaggag

SEQ ID NO: 34580 - DNA, 29 bp, Artificial Sequence
  Probe
tcgaaaccatcctctgctagggagcgttt

SEQ ID NO: 34581 - DNA, 21 bp, Artificial Sequence
  Probe
tcgaaaccatcctctgctatc

SEQ ID NO: 34582 - DNA, 18 bp, Artificial Sequence
  Probe
tcgaaaccgggcggaaac

SEQ ID NO: 34583 - DNA, 21 bp, Artificial Sequence
  Probe
tcgaaaccgggcggaaacacc

SEQ ID NO: 34584 - DNA, 22 bp, Artificial Sequence
  Probe
tcgaaaccgggcggaaacacct

SEQ ID NO: 34585 - DNA, 18 bp, Artificial Sequence
  Probe
tcgaacccatccctgaga

SEQ ID NO: 34586 - DNA, 30 bp, Artificial Sequence
  Probe
tcgaagaagcagcttcaaacctgccggggc

SEQ ID NO: 34587 - DNA, 31 bp, Artificial Sequence; identical to SEQ ID NO: 7937
  Probe

SEQ ID NO: 34588 - DNA, 32 bp, Artificial Sequence; identical to SEQ ID NO: 7938
  Probe

SEQ ID NO: 34589 - DNA, 33 bp, Artificial Sequence; identical to SEQ ID NO: 7939
  Probe

SEQ ID NO: 34590 - DNA, 21 bp, Artificial Sequence
  Probe
tcgaatcccaccgctgccaca

SEQ ID NO: 34591 - DNA, 21 bp, Artificial Sequence
  Probe
tcgaatcccaccgctgccagc

SEQ ID NO: 34592 - DNA, 21 bp, Artificial Sequence
  Probe
tcgaatcccaccttcgtcgac

SEQ ID NO: 34593 - DNA, 19 bp, Artificial Sequence
  Probe
tcgaatcccactcctgaca

SEQ ID NO: 34594 - DNA, 20 bp, Artificial Sequence
  Probe
tcgaatcccactcctgacaa

SEQ ID NO: 34595 - DNA, 20 bp, Artificial Sequence
  Probe
tcgaatcccactcctgacag

SEQ ID NO: 34596 - DNA, 19 bp, Artificial Sequence
  Probe
tcgaatcccacttctgaca

SEQ ID NO: 34597 - DNA, 20 bp, Artificial Sequence
  Probe
tcgaatcccacttctgacac

SEQ ID NO: 34598 - DNA, 21 bp, Artificial Sequence
  Probe
tcgaatcccacttctgacaca

SEQ ID NO: 34599 - DNA, 22 bp, Artificial Sequence
  Probe
tcgaatcccacttctgacacaa

SEQ ID NO: 34600 - DNA, 22 bp, Artificial Sequence
  Probe
tcgaatcccacttctgacacag

SEQ ID NO: 34601 - DNA, 22 bp, Artificial Sequence
  Probe
tcgaatcccagcggtgcctcaa

SEQ ID NO: 34602 - DNA, 22 bp, Artificial Sequence
  Probe
tcgaatcccagcggtgcctccg

SEQ ID NO: 34603 - DNA, 20 bp, Artificial Sequence
  Probe
tcgaatcccatcctcgtcgc

SEQ ID NO: 34604 - DNA, 21 bp, Artificial Sequence
  Probe
tcgaatcccatcctcgtcgct

SEQ ID NO: 34605 - DNA, 21 bp, Artificial Sequence
  Probe
tcgaatcccatcctcgtcggc

SEQ ID NO: 34606 - DNA, 21 bp, Artificial Sequence
  Probe
tcgaatccggctcgaaggacg

SEQ ID NO: 34607 - DNA, 22 bp, Artificial Sequence
  Probe
tcgaatccggctcgaaggacga

SEQ ID NO: 34608 - DNA, 21 bp, Artificial Sequence
  Probe
tcgaatccggctcggaggacg

SEQ ID NO: 34609 - DNA, 21 bp, Artificial Sequence
  Probe
tcgaatcctgccgactacggc

SEQ ID NO: 34610 - DNA, 22 bp, Artificial Sequence
  Probe
tcgaatcctgccgactacggca

SEQ ID NO: 34611 - DNA, 21 bp, Artificial Sequence
  Probe
tcgaatcctgccgactacgtc

SEQ ID NO: 34612 - DNA, 22 bp, Artificial Sequence
  Probe
tcgaatcctgccgactacgtca

SEQ ID NO: 34613 - DNA, 22 bp, Artificial Sequence
  Probe
tcgaatcctgctcacagcgtca

SEQ ID NO: 34614 - DNA, 32 bp, Artificial Sequence
  Probe
tcgactcattaaattatgataatcatatttac

SEQ ID NO: 34615 - DNA, 33 bp, Artificial Sequence; identical to SEQ ID NO: 7958
  Probe

SEQ ID NO: 34616 - DNA, 36 bp, Artificial Sequence
  Probe
tcgactcattaaattatgataatcatatttaccaaa

SEQ ID NO: 34617 - DNA, 21 bp, Artificial Sequence
  Probe
tcgactcccggtgtgggaacg

SEQ ID NO: 34618 - DNA, 21 bp, Artificial Sequence
  Probe
tcgactcctggctggctcgcg

SEQ ID NO: 34619 - DNA, 22 bp, Artificial Sequence
  Probe
tcgactcctggctggctcgcga

SEQ ID NO: 34620 - DNA, 21 bp, Artificial Sequence
  Probe
tcgactcctggctggctcgct

SEQ ID NO: 34621 - DNA, 18 bp, Artificial Sequence
  Probe
tcgagaggggctgtgctc

SEQ ID NO: 34622 - DNA, 21 bp, Artificial Sequence
  Probe
tcgagaggggctgtgctcgca

SEQ ID NO: 34623 - DNA, 24 bp, Artificial Sequence
  Probe
tcgagaggggctgtgctcgcaagg

SEQ ID NO: 34624 - DNA, 25 bp, Artificial Sequence
  Probe
tcgagaggggctgtgctcgcaaggt

SEQ ID NO: 34625 - DNA, 26 bp, Artificial Sequence
  Probe
tcgagaggggctgtgctcgcaaggtt

SEQ ID NO: 34626 - DNA, 27 bp, Artificial Sequence
  Probe
tcgagaggggctgtgctcgcaaggttt

SEQ ID NO: 34627 - DNA, 28 bp, Artificial Sequence
  Probe
tcgagaggggctgtgctcgcaaggtttc

SEQ ID NO: 34628 - DNA, 29 bp, Artificial Sequence
  Probe
tcgagaggggctgtgctcgcaaggtttct

SEQ ID NO: 34629 - DNA, 30 bp, Artificial Sequence; identical to SEQ ID NO: 11965
  Probe

SEQ ID NO: 34630 - DNA, 22 bp, Artificial Sequence
  Probe
tcgagcccacccagggacgcct

SEQ ID NO: 34631 - DNA, 22 bp, Artificial Sequence
  Probe
tcgagcccacccagggacgcta

SEQ ID NO: 34632 - DNA, 18 bp, Artificial Sequence
  Probe
tcgagccccagtggaacc

SEQ ID NO: 34633 - DNA, 20 bp, Artificial Sequence
  Probe
tcgagccccagtggaaccac

SEQ ID NO: 34634 - DNA, 21 bp, Artificial Sequence
  Probe
tcgagccccagtggaaccacg

SEQ ID NO: 34635 - DNA, 36 bp, Artificial Sequence
  Probe
tcgagccccagtggaaccatgagatgttacctagcg

SEQ ID NO: 34636 - DNA, 30 bp, Artificial Sequence
  Probe
tcgatagctcagctggtagagcggaggact

SEQ ID NO: 34637 - DNA, 17 bp, Artificial Sequence
  Probe
tcgatccccggcatctc

SEQ ID NO: 34638 - DNA, 22 bp, Artificial Sequence
  Probe
tcgatccccgtacgggccacga

SEQ ID NO: 34639 - DNA, 20 bp, Artificial Sequence
  Probe
tcgatcccgggtttcggcac

SEQ ID NO: 34640 - DNA, 21 bp, Artificial Sequence
  Probe
tcgattccccgacggggagac

SEQ ID NO: 34641 - DNA, 21 bp, Artificial Sequence
  Probe
tcgattccccgacggggaggc

SEQ ID NO: 34642 - DNA, 22 bp, Artificial Sequence
  Probe
tcgattccccgacggggaggca

SEQ ID NO: 34643 - DNA, 17 bp, Artificial Sequence
  Probe
tcgattcccggccaacg

SEQ ID NO: 34644 - DNA, 19 bp, Artificial Sequence
  Probe
tcgattcccggccaacgca

SEQ ID NO: 34645 - DNA, 20 bp, Artificial Sequence
  Probe
tcgattcccggccaacgcaa

SEQ ID NO: 34646 - DNA, 20 bp, Artificial Sequence
  Probe
tcgattcccggccaacgcag

SEQ ID NO: 34647 - DNA, 21 bp, Artificial Sequence
  Probe
tcgattcccggccaacgcagc

SEQ ID NO: 34648 - DNA, 22 bp, Artificial Sequence
  Probe
tcgattcccggccaacgcagcg

SEQ ID NO: 34649 - DNA, 20 bp, Artificial Sequence
  Probe
tcgattcccggccaacgcat

SEQ ID NO: 34650 - DNA, 17 bp, Artificial Sequence
  Probe
tcgattcccggccaatg

SEQ ID NO: 34651 - DNA, 19 bp, Artificial Sequence
  Probe
tcgattcccggccaatgca

SEQ ID NO: 34652 - DNA, 21 bp, Artificial Sequence
  Probe
tcgattcccggccaatgcaac

SEQ ID NO: 34653 - DNA, 22 bp, Artificial Sequence
  Probe
tcgattcccggccaatgcaacg

SEQ ID NO: 34654 - DNA, 20 bp, Artificial Sequence
  Probe
tcgattcccggccaatgcac

SEQ ID NO: 34655 - DNA, 21 bp, Artificial Sequence
  Probe
tcgattcccggccaatgcacg

SEQ ID NO: 34656 - DNA, 22 bp, Artificial Sequence
  Probe
tcgattcccggccaatgcacga

SEQ ID NO: 34657 - DNA, 21 bp, Artificial Sequence
  Probe
tcgattcccggccaatgcact

SEQ ID NO: 34658 - DNA, 21 bp, Artificial Sequence
  Probe
tcgattcccggccaatgcagc

SEQ ID NO: 34659 - DNA, 22 bp, Artificial Sequence
  Probe
tcgattcccggccaatgcagca

SEQ ID NO: 34660 - DNA, 19 bp, Artificial Sequence
  Probe
tcgattcccggcccatgca

SEQ ID NO: 34661 - DNA, 21 bp, Artificial Sequence
  Probe
tcgattcccggcccatgcagc

SEQ ID NO: 34662 - DNA, 22 bp, Artificial Sequence
  Probe
tcgattcccggcccatgcagca

SEQ ID NO: 34663 - DNA, 19 bp, Artificial Sequence
  Probe
tcgattcccgggcggcgca

SEQ ID NO: 34664 - DNA, 20 bp, Artificial Sequence
  Probe
tcgattcccgggcggcgcac

SEQ ID NO: 34665 - DNA, 21 bp, Artificial Sequence
  Probe
tcgattcccgggcggcgcact

SEQ ID NO: 34666 - DNA, 19 bp, Artificial Sequence
  Probe
tcgattccggctcgaagga

SEQ ID NO: 34667 - DNA, 20 bp, Artificial Sequence
  Probe
tcgattccggctcgaaggac

SEQ ID NO: 34668 - DNA, 21 bp, Artificial Sequence
  Probe
tcgattccggctcgaaggact

SEQ ID NO: 34669 - DNA, 21 bp, Artificial Sequence
  Probe
tcgattccggctcgaaggagc

SEQ ID NO: 34670 - DNA, 21 bp, Artificial Sequence
  Probe
tcgattccttccttttttgtc

SEQ ID NO: 34671 - DNA, 36 bp, Artificial Sequence
  Probe
tcgcataaaacttaaaactttacagtcagaggttca

SEQ ID NO: 34672 - DNA, 22 bp, Artificial Sequence
  Probe
tcgcatgtatgaggccccgggt

SEQ ID NO: 34673 - DNA, 15 bp, Artificial Sequence
  Probe
tcgcccggctagctc

SEQ ID NO: 34674 - DNA, 36 bp, Artificial Sequence
  Probe
tcgcccggctagctcagtcggtagagcatgagactc

SEQ ID NO: 34675 - DNA, 23 bp, Artificial Sequence
  Probe
tcgccgtgatcgtatagtggtta

SEQ ID NO: 34676 - DNA, 36 bp, Artificial Sequence
  Probe
tcgccgtgatcgtatagtggttagtactctgcgttg

SEQ ID NO: 34677 - DNA, 26 bp, Artificial Sequence
  Probe
tcgcctcccacgcgggagacccgggt

SEQ ID NO: 34678 - DNA, 15 bp, Artificial Sequence
  Probe
tcgcgatgtctgttt

SEQ ID NO: 34679 - DNA, 26 bp, Artificial Sequence
  Probe
tcgcgggttcgatccccgtacgggcc

SEQ ID NO: 34680 - DNA, 27 bp, Artificial Sequence
  Probe
tcgcgggttcgatccccgtacgggcca

SEQ ID NO: 34681 - DNA, 36 bp, Artificial Sequence
  Probe
tcgcgggttcgatccccgtacgggccaggattgaaa

SEQ ID NO: 34682 - DNA, 17 bp, Artificial Sequence
  Probe
tcggcgctctcaccgcc

SEQ ID NO: 34683 - DNA, 28 bp, Artificial Sequence
  Probe
tcggcgctctcaccgccgcggcccgggt

SEQ ID NO: 34684 - DNA, 29 bp, Artificial Sequence
  Probe
tcggcgctctcaccgccgcggcccgggtt

SEQ ID NO: 34685 - DNA, 36 bp, Artificial Sequence
  Probe
tcggcgctctcaccgccgcggcccgggttcgattcc

SEQ ID NO: 34686 - DNA, 23 bp, Artificial Sequence
  Probe
tcggctgttaaccgaaaggttgg

SEQ ID NO: 34687 - DNA, 28 bp, Artificial Sequence
  Probe
tcggctgttaaccgaaaggttggtggtt

SEQ ID NO: 34688 - DNA, 33 bp, Artificial Sequence
  Probe
tcggctgttaaccgaaaggttggtggttcgagc

SEQ ID NO: 34689 - DNA, 36 bp, Artificial Sequence
  Probe
tcggctgttaaccgaaaggttggtggttcgagccca

SEQ ID NO: 34690 - DNA, 27 bp, Artificial Sequence
  Probe
tcggctgttaactgaaaggttggtggt

SEQ ID NO: 34691 - DNA, 23 bp, Artificial Sequence
  Probe
tcggctttccctgctaactgggc

SEQ ID NO: 34692 - DNA, 24 bp, Artificial Sequence
  Probe
tcggctttccctgctaactgggct

SEQ ID NO: 34693 - DNA, 25 bp, Artificial Sequence
  Probe
tcggctttccctgctaactgggctt

SEQ ID NO: 34694 - DNA, 26 bp, Artificial Sequence
  Probe
tcggctttccctgctaactgggcttt

SEQ ID NO: 34695 - DNA, 27 bp, Artificial Sequence
  Probe
tcggctttccctgctaactgggctttt

SEQ ID NO: 34696 - DNA, 29 bp, Artificial Sequence
  Probe
tcggctttccctgctaactgggctttttt

SEQ ID NO: 34697 - DNA, 36 bp, Artificial Sequence
  Probe
tcgggagcgcccggatagctcagtcggtagagcatc

SEQ ID NO: 34698 - DNA, 36 bp, Artificial Sequence
  Probe
tcgggcccataccccgaaaatgttggttataccctt

SEQ ID NO: 34699 - DNA, 36 bp, Artificial Sequence
  Probe
tcgggcgcccggctagctcagtcggtagagcatgag

SEQ ID NO: 34700 - DNA, 19 bp, Artificial Sequence
  Probe
tcgggcgggagtggtggct

SEQ ID NO: 34701 - DNA, 20 bp, Artificial Sequence
  Probe
tcgggcgggagtggtggctt

SEQ ID NO: 34702 - DNA, 21 bp, Artificial Sequence
  Probe
tcgggcgggagtggtggcttt

SEQ ID NO: 34703 - DNA, 22 bp, Artificial Sequence
  Probe
tcgggcgggagtggtggctttt

SEQ ID NO: 34704 - DNA, 23 bp, Artificial Sequence
  Probe
tcgggcgggagtggtggctttta

SEQ ID NO: 34705 - DNA, 17 bp, Artificial Sequence
  Probe
tcgggtgcgagaggtcc

SEQ ID NO: 34706 - DNA, 24 bp, Artificial Sequence
  Probe
tcgggtgcgagaggtcccgggttc

SEQ ID NO: 34707 - DNA, 21 bp, Artificial Sequence
  Probe
tcgggtgtgagaggtcccggg

SEQ ID NO: 34708 - DNA, 22 bp, Artificial Sequence
  Probe
tcgggtgtgagaggtcccgggt

SEQ ID NO: 34709 - DNA, 23 bp, Artificial Sequence
  Probe
tcgggtgtgagaggtcccgggtt

SEQ ID NO: 34710 - DNA, 15 bp, Artificial Sequence
  Probe
tcggtagagcatcag

SEQ ID NO: 34711 - DNA, 20 bp, Artificial Sequence
  Probe
tcggtagagcatcagacttt

SEQ ID NO: 34712 - DNA, 21 bp, Artificial Sequence
  Probe
tcggtagagcatcagactttt

SEQ ID NO: 34713 - DNA, 16 bp, Artificial Sequence
  Probe
tcggtagagcatgaga

SEQ ID NO: 34714 - DNA, 17 bp, Artificial Sequence
  Probe
tcggtagagcatgagac

SEQ ID NO: 34715 - DNA, 18 bp, Artificial Sequence
  Probe
tcggtagagcatgagacc

SEQ ID NO: 34716 - DNA, 18 bp, Artificial Sequence
  Probe
tcggtagagcatgagact

SEQ ID NO: 34717 - DNA, 19 bp, Artificial Sequence
  Probe
tcggtagagcatgagactc

SEQ ID NO: 34718 - DNA, 25 bp, Artificial Sequence
  Probe
tcggtagagcatgagactcttaatc

SEQ ID NO: 34719 - DNA, 26 bp, Artificial Sequence
  Probe
tcggtagagcatgagactcttaatct

SEQ ID NO: 34720 - DNA, 27 bp, Artificial Sequence
  Probe
tcggtagagcatgagactcttaatctc

SEQ ID NO: 34721 - DNA, 36 bp, Artificial Sequence
  Probe
tcggtagagcatgagactcttaatctcagggtcgtg

SEQ ID NO: 34722 - DNA, 39 bp, Artificial Sequence
  Probe
tcggtagagcatgagactcttaatctcagggtcgtgggt

SEQ ID NO: 34723 - DNA, 15 bp, Artificial Sequence
  Probe
tcggtagagcatggg

SEQ ID NO: 34724 - DNA, 16 bp, Artificial Sequence
  Probe
tcggtagagcatggga

SEQ ID NO: 34725 - DNA, 25 bp, Artificial Sequence
  Probe
tcggtagagcatgggactcttaatc

SEQ ID NO: 34726 - DNA, 36 bp, Artificial Sequence
  Probe
tcggtagagcatgggactcttaatcccagggtcgtg

SEQ ID NO: 34727 - DNA, 36 bp, Artificial Sequence
  Probe
tcggtgcatgggtggttcagtggtagaattctcgcc

SEQ ID NO: 34728 - DNA, 23 bp, Artificial Sequence
  Probe
tcggtggaacctgcattggtttt

SEQ ID NO: 34729 - DNA, 21 bp, Artificial Sequence
  Probe
tcggtgggacctcacgagact

SEQ ID NO: 34730 - DNA, 25 bp, Artificial Sequence
  Probe
tcggttagcgcgttcggctgttaac

SEQ ID NO: 34731 - DNA, 17 bp, Artificial Sequence
  Probe
tcgtaaacaggagatcc

SEQ ID NO: 34732 - DNA, 18 bp, Artificial Sequence
  Probe
tcgtaaacaggagatcct

SEQ ID NO: 34733 - DNA, 22 bp, Artificial Sequence
  Probe
tcgtaaaccgaagatcacgggt

SEQ ID NO: 34734 - DNA, 23 bp, Artificial Sequence
  Probe
tcgtatagtggttagtactctgc

SEQ ID NO: 34735 - DNA, 36 bp, Artificial Sequence
  Probe
tcgtatagtggttagtactctgcgttgtggccgcag

SEQ ID NO: 34736 - DNA, 41 bp, Artificial Sequence
  Probe
tcgtatagtggttagtactctgcgttgtggccgcagcaacc

SEQ ID NO: 34737 - DNA, 42 bp, Artificial Sequence
  Probe
tcgtatagtggttagtactctgcgttgtggccgcagcaacct

SEQ ID NO: 34738 - DNA, 46 bp, Artificial Sequence
  Probe
tcgtatagtggttagtactctgcgttgtggccgcagcaacctcggt

SEQ ID NO: 34739 - DNA, 15 bp, Artificial Sequence
  Probe
tcgtggctactgttt

SEQ ID NO: 34740 - DNA, 16 bp, Artificial Sequence
  Probe
tcgtggctactgtttt

SEQ ID NO: 34741 - DNA, 17 bp, Artificial Sequence
  Probe
tcgtggctactgttttt

SEQ ID NO: 34742 - DNA, 18 bp, Artificial Sequence
  Probe
tcgtggctactgtttttc

SEQ ID NO: 34743 - DNA, 26 bp, Artificial Sequence
  Probe
tcgtgggttcgagccccacgttgggc

SEQ ID NO: 34744 - DNA, 27 bp, Artificial Sequence
  Probe
tcgtgggttcgagccccacgttgggcg

SEQ ID NO: 34745 - DNA, 28 bp, Artificial Sequence
  Probe
tcgtgggttcgagccccacgttgggcgc

SEQ ID NO: 34746 - DNA, 15 bp, Artificial Sequence
  Probe
tcgtggttgtagtcc

SEQ ID NO: 34747 - DNA, 22 bp, Artificial Sequence
  Probe
tcgtggttgtagtccgtgcgag

SEQ ID NO: 34748 - DNA, 25 bp, Artificial Sequence
  Probe
tcgtggttgtagtccgtgcgagaat

SEQ ID NO: 34749 - DNA, 26 bp, Artificial Sequence
  Probe
tcgtggttgtagtccgtgcgagaata

SEQ ID NO: 34750 - DNA, 27 bp, Artificial Sequence
  Probe
tcgtggttgtagtccgtgcgagaataa

SEQ ID NO: 34751 - DNA, 28 bp, Artificial Sequence
  Probe
tcgttagtatagtggtgagtatccccgc

SEQ ID NO: 34752 - DNA, 15 bp, Artificial Sequence
  Probe
tcgttggtctagggg

SEQ ID NO: 34753 - DNA, 17 bp, Artificial Sequence
  Probe
tcgttggtctaggggta

SEQ ID NO: 34754 - DNA, 23 bp, Artificial Sequence
  Probe
tcgttggtctaggggtatgattc

SEQ ID NO: 34755 - DNA, 24 bp, Artificial Sequence
  Probe
tcgttggtctaggggtatgattct

SEQ ID NO: 34756 - DNA, 25 bp, Artificial Sequence
  Probe
tcgttggtctaggggtatgattctc

SEQ ID NO: 34757 - DNA, 26 bp, Artificial Sequence
  Probe
tcgttggtctaggggtatgattctcg

SEQ ID NO: 34758 - DNA, 27 bp, Artificial Sequence
  Probe
tcgttggtctaggggtatgattctcgc

SEQ ID NO: 34759 - DNA, 28 bp, Artificial Sequence
  Probe
tcgttggtctaggggtatgattctcgct

SEQ ID NO: 34760 - DNA, 29 bp, Artificial Sequence
  Probe
tcgttggtctaggggtatgattctcgctt

SEQ ID NO: 34761 - DNA, 28 bp, Artificial Sequence
  Probe
tcgttggtctaggggtatgattctcggt

SEQ ID NO: 34762 - DNA, 34 bp, Artificial Sequence; identical to SEQ ID NO: 24121
  Probe

SEQ ID NO: 34763 - DNA, 36 bp, Artificial Sequence
  Probe
tctaaaggtccctggttcgatcccgggtttcggcac

SEQ ID NO: 34764 - DNA, 23 bp, Artificial Sequence
  Probe
tctaacaacatggctttctcaac

SEQ ID NO: 34765 - DNA, 18 bp, Artificial Sequence
  Probe
tctaccccctctagagcc

SEQ ID NO: 34766 - DNA, 19 bp, Artificial Sequence
  Probe
tctaccccctctagagccc

SEQ ID NO: 34767 - DNA, 21 bp, Artificial Sequence
  Probe
tctagagcccactgtaaagct

SEQ ID NO: 34768 - DNA, 36 bp, Artificial Sequence
  Probe
tctagagcccactgtaaagctaacttagcattaacc

SEQ ID NO: 34769 - DNA, 19 bp, Artificial Sequence
  Probe
tctagaggctgaaggcatt

SEQ ID NO: 34770 - DNA, 30 bp, Artificial Sequence
  Probe
tctagattttatgtatacgggttcttcgaa

SEQ ID NO: 34771 - DNA, 32 bp, Artificial Sequence
  Probe
tctagcggttaggattcctggttttcacccag

SEQ ID NO: 34772 - DNA, 23 bp, Artificial Sequence
  Probe
tctaggactatgagaatcgaacc

SEQ ID NO: 34773 - DNA, 34 bp, Artificial Sequence
  Probe
tctaggactatgagaatcgaacccatccctgaga

SEQ ID NO: 34774 - DNA, 20 bp, Artificial Sequence
  Probe
tctaggctgtcagctcttcc

SEQ ID NO: 34775 - DNA, 18 bp, Artificial Sequence
  Probe
tctaggggtatgattctc

SEQ ID NO: 34776 - DNA, 20 bp, Artificial Sequence
  Probe
tctaggggtatgattctcgc

SEQ ID NO: 34777 - DNA, 21 bp, Artificial Sequence
  Probe
tctaggggtatgattctcgct

SEQ ID NO: 34778 - DNA, 22 bp, Artificial Sequence
  Probe
tctaggggtatgattctcgctt

SEQ ID NO: 34779 - DNA, 20 bp, Artificial Sequence
  Probe
tctagtggttaggattcggc

SEQ ID NO: 34780 - DNA, 32 bp, Artificial Sequence
  Probe
tctagtggttaggattcggcgctctcaccgcc

SEQ ID NO: 34781 - DNA, 39 bp, Artificial Sequence; identical to SEQ ID NO: 24131
  Probe

SEQ ID NO: 34782 - DNA, 43 bp, Artificial Sequence
  Probe
tctagtggttaggattcggcgctctcaccgccgcggcccgggt

SEQ ID NO: 34783 - DNA, 15 bp, Artificial Sequence
  Probe
tctcaccgccgcggc

SEQ ID NO: 34784 - DNA, 16 bp, Artificial Sequence
  Probe
tctcaccgccgcggcc

SEQ ID NO: 34785 - DNA, 17 bp, Artificial Sequence
  Probe
tctcaccgccgcggccc

SEQ ID NO: 34786 - DNA, 18 bp, Artificial Sequence
  Probe
tctcaccgccgcggcccg

SEQ ID NO: 34787 - DNA, 21 bp, Artificial Sequence
  Probe
tctcaccgccgcggcccgggt

SEQ ID NO: 34788 - DNA, 36 bp, Artificial Sequence
  Probe
tctcaccgccgcggcccgggttcgattcccggtcag

SEQ ID NO: 34789 - DNA, 43 bp, Artificial Sequence
  Probe
tctcaccgccgcggcccgggttcgattcccggtcagggaaaga

SEQ ID NO: 34790 - DNA, 43 bp, Artificial Sequence; identical to SEQ ID NO: 8000
  Probe

SEQ ID NO: 34791 - DNA, 43 bp, Artificial Sequence
  Probe
tctcaccgccgcggcccgggttcgattcccggtcagggaatga

SEQ ID NO: 34792 - DNA, 23 bp, Artificial Sequence
  Probe
tctcagggatgggttcgattctc

SEQ ID NO: 34793 - DNA, 31 bp, Artificial Sequence; identical to SEQ ID NO: 24132
  Probe

SEQ ID NO: 34794 - DNA, 38 bp, Artificial Sequence
  Probe
tctcagggtcgtgggttcgagccccacgttgggcggca

SEQ ID NO: 34795 - DNA, 20 bp, Artificial Sequence
  Probe
tctccaatggaggcgtgggt

SEQ ID NO: 34796 - DNA, 36 bp, Artificial Sequence; identical to SEQ ID NO: 24137
  Probe

SEQ ID NO: 34797 - DNA, 39 bp, Artificial Sequence
  Probe
tctccaatggaggcgtgggttcgaatcccacttctgaca

SEQ ID NO: 34798 - DNA, 20 bp, Artificial Sequence
  Probe
tctcccctggaggcgtgggt

SEQ ID NO: 34799 - DNA, 21 bp, Artificial Sequence
  Probe
tctcccctggaggcgtgggtt

SEQ ID NO: 34800 - DNA, 21 bp, Artificial Sequence
  Probe
tctccggatggaggcgtgggt

SEQ ID NO: 34801 - DNA, 15 bp, Artificial Sequence
  Probe
tctcgcctgccacgc

SEQ ID NO: 34802 - DNA, 15 bp, Artificial Sequence
  Probe
tctcgctggggcctc

SEQ ID NO: 34803 - DNA, 17 bp, Artificial Sequence
  Probe
tctcgctggggcctcgg

SEQ ID NO: 34804 - DNA, 19 bp, Artificial Sequence
  Probe
tctcggtggaacctgcatt

SEQ ID NO: 34805 - DNA, 25 bp, Artificial Sequence
  Probe
tctcggtggaacctgcattggtttt

SEQ ID NO: 34806 - DNA, 36 bp, Artificial Sequence
  Probe
tctcggtggaacctgctcgaagatatatgtatatat

SEQ ID NO: 34807 - DNA, 15 bp, Artificial Sequence
  Probe
tctcggtgggaccta

SEQ ID NO: 34808 - DNA, 15 bp, Artificial Sequence
  Probe
tctcggtgggacctc

SEQ ID NO: 34809 - DNA, 16 bp, Artificial Sequence
  Probe
tctcggtgggacctca

SEQ ID NO: 34810 - DNA, 16 bp, Artificial Sequence
  Probe
tctgaaggtcctgagt

SEQ ID NO: 34811 - DNA, 36 bp, Artificial Sequence
  Probe
tctgaaggtcctgagttcgaacctcagagggggcaa

SEQ ID NO: 34812 - DNA, 36 bp, Artificial Sequence
  Probe
tctgaaggtcctgagttcgaacctcagagggggcag

SEQ ID NO: 34813 - DNA, 38 bp, Artificial Sequence; identical to SEQ ID NO: 24142
  Probe

SEQ ID NO: 34814 - DNA, 36 bp, Artificial Sequence
  Probe
tctgaaggtcctgagttcgagcctcagagagggcag

SEQ ID NO: 34815 - DNA, 16 bp, Artificial Sequence
  Probe
tctgaaggtcgtgagt

SEQ ID NO: 34816 - DNA, 34 bp, Artificial Sequence
  Probe
tctgaaggtcgtgagttcgagcctcacacggggc

SEQ ID NO: 34817 - DNA, 35 bp, Artificial Sequence
  Probe
tctgaaggtcgtgagttcgagcctcacacggggca

SEQ ID NO: 34818 - DNA, 36 bp, Artificial Sequence
  Probe
tctgaaggtcgtgagttcgagcctcacacggggcag

SEQ ID NO: 34819 - DNA, 33 bp, Artificial Sequence
  Probe
tctgaaggtcgtgagttcgatcctcacacgggg

SEQ ID NO: 34820 - DNA, 34 bp, Artificial Sequence
  Probe
tctgaaggtcgtgagttcgatcctcacacggggc

SEQ ID NO: 34821 - DNA, 35 bp, Artificial Sequence; identical to SEQ ID NO: 24143
  Probe

SEQ ID NO: 34822 - DNA, 37 bp, Artificial Sequence
  Probe
tctgaaggtcgtgagttcgatcctcacacggggcaca

SEQ ID NO: 34823 - DNA, 38 bp, Artificial Sequence; identical to SEQ ID NO: 8005
  Probe

SEQ ID NO: 34824 - DNA, 19 bp, Artificial Sequence
  Probe
tctgaatccagcgatccga

SEQ ID NO: 34825 - DNA, 23 bp, Artificial Sequence
  Probe
tctgaatccagcgatccgagttc

SEQ ID NO: 34826 - DNA, 21 bp, Artificial Sequence
  Probe
tctgacaacagaggcttacga

SEQ ID NO: 34827 - DNA, 36 bp, Artificial Sequence; identical to SEQ ID NO: 8009
  Probe

SEQ ID NO: 34828 - DNA, 16 bp, Artificial Sequence
  Probe
tctgacacattcgttt

SEQ ID NO: 34829 - DNA, 22 bp, Artificial Sequence
  Probe
tctgacagagctcaattacttt

SEQ ID NO: 34830 - DNA, 28 bp, Artificial Sequence
  Probe
tctgacttcggatcagaagattgagggt

SEQ ID NO: 34831 - DNA, 22 bp, Artificial Sequence
  Probe
tctgagggtccagggttcaagt

SEQ ID NO: 34832 - DNA, 36 bp, Artificial Sequence
  Probe
tctgagggtccagggttcaagtccctgtccaggcgc

SEQ ID NO: 34833 - DNA, 38 bp, Artificial Sequence
  Probe
tctgagggtccagggttcaagtccctgtccaggcgcta

SEQ ID NO: 34834 - DNA, 36 bp, Artificial Sequence
  Probe
tctgagggtccagggttcaagtccctgttcaggcga

SEQ ID NO: 34835 - DNA, 35 bp, Artificial Sequence
  Probe
tctgagggtccagggttcaagtccctgttcgggcg

SEQ ID NO: 34836 - DNA, 36 bp, Artificial Sequence; identical to SEQ ID NO: 24148
  Probe

SEQ ID NO: 34837 - DNA, 37 bp, Artificial Sequence
  Probe
tctgagggtccagggttcaagtccctgttcgggcggc

SEQ ID NO: 34838 - DNA, 38 bp, Artificial Sequence; identical to SEQ ID NO: 24149
  Probe

SEQ ID NO: 34839 - DNA, 36 bp, Artificial Sequence; identical to SEQ ID NO: 24150
  Probe

SEQ ID NO: 34840 - DNA, 37 bp, Artificial Sequence
  Probe
tctgagggtccagggttcaagtccctgttcgggcgtc

SEQ ID NO: 34841 - DNA, 36 bp, Artificial Sequence
  Probe
tctgataaaagagttactttgatagagtaaataata

SEQ ID NO: 34842 - DNA, 28 bp, Artificial Sequence
  Probe
tctgattccggatcagaagattgagggt

SEQ ID NO: 34843 - DNA, 15 bp, Artificial Sequence
  Probe
tctggactctgaatc

SEQ ID NO: 34844 - DNA, 16 bp, Artificial Sequence
  Probe
tctggactctgaatcc

SEQ ID NO: 34845 - DNA, 27 bp, Artificial Sequence
  Probe
tctggactctgaatccagcgatccgag

SEQ ID NO: 34846 - DNA, 30 bp, Artificial Sequence
  Probe
tctggactctgaatccagcgatccgagttc

SEQ ID NO: 34847 - DNA, 15 bp, Artificial Sequence
  Probe
tctggactttgaatc

SEQ ID NO: 34848 - DNA, 16 bp, Artificial Sequence
  Probe
tctggactttgaatcc

SEQ ID NO: 34849 - DNA, 22 bp, Artificial Sequence
  Probe
tctggtaaagaggagttgtttt

SEQ ID NO: 34850 - DNA, 29 bp, Artificial Sequence
  Probe
tctgtagtgtagtggttatcacgttcgcc

SEQ ID NO: 34851 - DNA, 30 bp, Artificial Sequence; identical to SEQ ID NO: 24153
  Probe

SEQ ID NO: 34852 - DNA, 24 bp, Artificial Sequence
  Probe
tctgtgctccggagttacctcgtt

SEQ ID NO: 34853 - DNA, 30 bp, Artificial Sequence
  Probe
tcttagctttgggtgctaatggtggagtta

SEQ ID NO: 34854 - DNA, 35 bp, Artificial Sequence
  Probe
tcttagctttgggtgctaatggtggagttaaagac

SEQ ID NO: 34855 - DNA, 50 bp, Artificial Sequence; identical to SEQ ID NO: 8014
  Probe

SEQ ID NO: 34856 - DNA, 31 bp, Artificial Sequence
  Probe
tcttgcgacccgggttcgattcccgggcggc

SEQ ID NO: 34857 - DNA, 32 bp, Artificial Sequence; identical to SEQ ID NO: 24159
  Probe

SEQ ID NO: 34858 - DNA, 16 bp, Artificial Sequence
  Probe
tctttaactccaccat

SEQ ID NO: 34859 - DNA, 27 bp, Artificial Sequence
  Probe
tcttttagtataaatagtaccgttaac

SEQ ID NO: 34860 - DNA, 28 bp, Artificial Sequence
  Probe
tcttttagtataaatagtaccgttaact

SEQ ID NO: 34861 - DNA, 29 bp, Artificial Sequence
  Probe
tcttttagtataaatagtaccgttaactt

SEQ ID NO: 34862 - DNA, 30 bp, Artificial Sequence; identical to SEQ ID NO: 24164
  Probe

SEQ ID NO: 34863 - DNA, 31 bp, Artificial Sequence; identical to SEQ ID NO: 1727
  Probe

SEQ ID NO: 34864 - DNA, 19 bp, Artificial Sequence
  Probe
tgaaaaagtcatggaggcc

SEQ ID NO: 34865 - DNA, 25 bp, Artificial Sequence
  Probe
tgaaaacaaaatactcaaatgggcc

SEQ ID NO: 34866 - DNA, 26 bp, Artificial Sequence
  Probe
tgaaaacaaaatactcaaatgggcct

SEQ ID NO: 34867 - DNA, 23 bp, Artificial Sequence
  Probe
tgaaaacctttttccaaggacaa

SEQ ID NO: 34868 - DNA, 20 bp, Artificial Sequence
  Probe
tgaaaatgtttagacgggct

SEQ ID NO: 34869 - DNA, 21 bp, Artificial Sequence
  Probe
tgaaaatgtttagacgggctc

SEQ ID NO: 34870 - DNA, 22 bp, Artificial Sequence
  Probe
tgaaaatgtttagacgggctca

SEQ ID NO: 34871 - DNA, 23 bp, Artificial Sequence
  Probe
tgaaaatgtttagacgggctcac

SEQ ID NO: 34872 - DNA, 24 bp, Artificial Sequence
  Probe
tgaaaatgtttagacgggctcaca

SEQ ID NO: 34873 - DNA, 29 bp, Artificial Sequence
  Probe
tgaaaatgtttagacgggctcacatcacc

SEQ ID NO: 34874 - DNA, 30 bp, Artificial Sequence
  Probe
tgaaaatgtttagacgggctcacatcaccc

SEQ ID NO: 34875 - DNA, 36 bp, Artificial Sequence
  Probe
tgaaatacaacgatggtttttcatatcattggtcgt

SEQ ID NO: 34876 - DNA, 50 bp, Artificial Sequence
  Probe
tgaaatacaacgatggtttttcatatcattggtcgtggttgtagtccgtg

SEQ ID NO: 34877 - DNA, 36 bp, Artificial Sequence
  Probe
tgaagagcccggatagctcagtcggtagagcatcag

SEQ ID NO: 34878 - DNA, 40 bp, Artificial Sequence
  Probe
tgaagagcccggatagctcagtcggtagagcatcagactt

SEQ ID NO: 34879 - DNA, 41 bp, Artificial Sequence
  Probe
tgaagagcccggatagctcagtcggtagagcatcagacttt

SEQ ID NO: 34880 - DNA, 16 bp, Artificial Sequence
  Probe
tgaagcattggactgt

SEQ ID NO: 34881 - DNA, 17 bp, Artificial Sequence
  Probe
tgaagcattggactgta

SEQ ID NO: 34882 - DNA, 18 bp, Artificial Sequence
  Probe
tgaagcattggactgtaa

SEQ ID NO: 34883 - DNA, 19 bp, Artificial Sequence
  Probe
tgaagcattggactgtaaa

SEQ ID NO: 34884 - DNA, 21 bp, Artificial Sequence
  Probe
tgaagcattggactgtaaatc

SEQ ID NO: 34885 - DNA, 22 bp, Artificial Sequence
  Probe
tgaagcattggactgtaaatct

SEQ ID NO: 34886 - DNA, 36 bp, Artificial Sequence
  Probe
tgaagcattggactgtaaatctaaagacaggggtta

SEQ ID NO: 34887 - DNA, 28 bp, Artificial Sequence
  Probe
tgaagccagttgattagggtgcttagct

SEQ ID NO: 34888 - DNA, 31 bp, Artificial Sequence
  Probe
tgaagccagttgattagggtgcttagctgtt

SEQ ID NO: 34889 - DNA, 35 bp, Artificial Sequence
  Probe
tgaagccagttgattagggtgcttagctgttaact

SEQ ID NO: 34890 - DNA, 36 bp, Artificial Sequence
  Probe
tgaagccagttgattagggtgcttagctgttaacta

SEQ ID NO: 34891 - DNA, 33 bp, Artificial Sequence; identical to SEQ ID NO: 8023
  Probe

SEQ ID NO: 34892 - DNA, 19 bp, Artificial Sequence
  Probe
tgaatccagcaatccgagt

SEQ ID NO: 34893 - DNA, 16 bp, Artificial Sequence
  Probe
tgaatccagcgatccg

SEQ ID NO: 34894 - DNA, 17 bp, Artificial Sequence
  Probe
tgaatccagcgatccga

SEQ ID NO: 34895 - DNA, 21 bp, Artificial Sequence
  Probe
tgaatccagcgatccgagttc

SEQ ID NO: 34896 - DNA, 22 bp, Artificial Sequence
  Probe
tgaatccagcgatccgagttca

SEQ ID NO: 34897 - DNA, 27 bp, Artificial Sequence
  Probe
tgaatctgacaacagaggcttacgacc

SEQ ID NO: 34898 - DNA, 33 bp, Artificial Sequence; identical to SEQ ID NO: 1737
  Probe

SEQ ID NO: 34899 - DNA, 35 bp, Artificial Sequence; identical to SEQ ID NO: 1739
  Probe

SEQ ID NO: 34900 - DNA, 38 bp, Artificial Sequence; identical to SEQ ID NO: 1742
  Probe

SEQ ID NO: 34901 - DNA, 39 bp, Artificial Sequence; identical to SEQ ID NO: 8042
  Probe

SEQ ID NO: 34902 - DNA, 40 bp, Artificial Sequence; identical to SEQ ID NO: 8043
  Probe

SEQ ID NO: 34903 - DNA, 36 bp, Artificial Sequence
  Probe
tgaattgcaaattcgaagaagcagcttcaaacctgc

SEQ ID NO: 34904 - DNA, 21 bp, Artificial Sequence
  Probe
tgacaacagaggcttacgacc

SEQ ID NO: 34905 - DNA, 22 bp, Artificial Sequence
  Probe
tgacaacagaggcttacgaccc

SEQ ID NO: 34906 - DNA, 18 bp, Artificial Sequence
  Probe
tgacagtgcgagcggagc

SEQ ID NO: 34907 - DNA, 19 bp, Artificial Sequence
  Probe
tgacagtgcgagcggagca

SEQ ID NO: 34908 - DNA, 15 bp, Artificial Sequence
  Probe
tgaccgctctgagct

SEQ ID NO: 34909 - DNA, 20 bp, Artificial Sequence
  Probe
tgaccgctctgagctaaacc

SEQ ID NO: 34910 - DNA, 21 bp, Artificial Sequence
  Probe
tgaccgctctgagctaaacct

SEQ ID NO: 34911 - DNA, 25 bp, Artificial Sequence
  Probe
tgaccgctctgagctaaacctagcc

SEQ ID NO: 34912 - DNA, 26 bp, Artificial Sequence
  Probe
tgaccgctctgagctaaacctagccc

SEQ ID NO: 34913 - DNA, 27 bp, Artificial Sequence
  Probe
tgaccgctctgagctaaacctagcccc

SEQ ID NO: 34914 - DNA, 28 bp, Artificial Sequence
  Probe
tgaccgctctgagctaaacctagcccca

SEQ ID NO: 34915 - DNA, 32 bp, Artificial Sequence
  Probe
tgaccgctctgagctaaacctagccccaaacc

SEQ ID NO: 34916 - DNA, 36 bp, Artificial Sequence
  Probe
tgaccgctctgagctaaacctagccccaaacccact

SEQ ID NO: 34917 - DNA, 25 bp, Artificial Sequence
  Probe
tgactgcagatcaagaggtccccgg

SEQ ID NO: 34918 - DNA, 27 bp, Artificial Sequence
  Probe
tgactgcagatcaagaggtccccggtt

SEQ ID NO: 34919 - DNA, 15 bp, Artificial Sequence
  Probe
tgactggacctttct

SEQ ID NO: 34920 - DNA, 17 bp, Artificial Sequence
  Probe
tgactggacctttcttt

SEQ ID NO: 34921 - DNA, 18 bp, Artificial Sequence
  Probe
tgactggacctttctttt

SEQ ID NO: 34922 - DNA, 26 bp, Artificial Sequence
  Probe
tgacttcggatcagaagattgagggt

SEQ ID NO: 34923 - DNA, 27 bp, Artificial Sequence
  Probe
tgacttcggatcagaagattgagggtt

SEQ ID NO: 34924 - DNA, 27 bp, Artificial Sequence
  Probe
tgacttcggatcagaagattgcaggtt

SEQ ID NO: 34925 - DNA, 24 bp, Artificial Sequence
  Probe
tgagaatcgaacccatccctgaga

SEQ ID NO: 34926 - DNA, 17 bp, Artificial Sequence
  Probe
tgagagcgctcggtttt

SEQ ID NO: 34927 - DNA, 28 bp, Artificial Sequence
  Probe
tgagatactgactagtctggtgttattt

SEQ ID NO: 34928 - DNA, 20 bp, Artificial Sequence
  Probe
tgagatgttacctagcgttt

SEQ ID NO: 34929 - DNA, 36 bp, Artificial Sequence
  Probe
tgagcactctggactctgaatccagcgatccgagtt

SEQ ID NO: 34930 - DNA, 29 bp, Artificial Sequence
  Probe
tgagcccggatagctcagtcggtagagca

SEQ ID NO: 34931 - DNA, 31 bp, Artificial Sequence
  Probe
tgagcccggatagctcagtcggtagagcatc

SEQ ID NO: 34932 - DNA, 36 bp, Artificial Sequence
  Probe
tgagcccggatagctcagtcggtagagcatcagact

SEQ ID NO: 34933 - DNA, 38 bp, Artificial Sequence
  Probe
tgagcccggatagctcagtcggtagagcatcagacttt

SEQ ID NO: 34934 - DNA, 27 bp, Artificial Sequence
  Probe
tgaggacaatggcacggcaaggggagt

SEQ ID NO: 34935 - DNA, 33 bp, Artificial Sequence; identical to SEQ ID NO: 8066
  Probe

SEQ ID NO: 34936 - DNA, 36 bp, Artificial Sequence; identical to SEQ ID NO: 24212
  Probe

SEQ ID NO: 34937 - DNA, 16 bp, Artificial Sequence
  Probe
tgaggtttttctgttt

SEQ ID NO: 34938 - DNA, 17 bp, Artificial Sequence
  Probe
tgagtatccccgcctgt

SEQ ID NO: 34939 - DNA, 18 bp, Artificial Sequence
  Probe
tgagtatccccgcctgtc

SEQ ID NO: 34940 - DNA, 17 bp, Artificial Sequence
  Probe
tgagtgaagcattggac

SEQ ID NO: 34941 - DNA, 18 bp, Artificial Sequence
  Probe
tgagtgaagcattggact

SEQ ID NO: 34942 - DNA, 19 bp, Artificial Sequence
  Probe
tgagtgaagcattggactg

SEQ ID NO: 34943 - DNA, 20 bp, Artificial Sequence
  Probe
tgagtgaagcattggactgt

SEQ ID NO: 34944 - DNA, 21 bp, Artificial Sequence
  Probe
tgagtgaagcattggactgta

SEQ ID NO: 34945 - DNA, 22 bp, Artificial Sequence
  Probe
tgagtgaagcattggactgtaa

SEQ ID NO: 34946 - DNA, 23 bp, Artificial Sequence
  Probe
tgagtgaagcattggactgtaaa

SEQ ID NO: 34947 - DNA, 24 bp, Artificial Sequence
  Probe
tgagtgaagcattggactgtaaat

SEQ ID NO: 34948 - DNA, 25 bp, Artificial Sequence
  Probe
tgagtgaagcattggactgtaaatc

SEQ ID NO: 34949 - DNA, 26 bp, Artificial Sequence
  Probe
tgagtgaagcattggactgtaaatct

SEQ ID NO: 34950 - DNA, 27 bp, Artificial Sequence
  Probe
tgagtgaagcattggactgtaaatcta

SEQ ID NO: 34951 - DNA, 28 bp, Artificial Sequence
  Probe
tgagtgaagcattggactgtaaatctaa

SEQ ID NO: 34952 - DNA, 29 bp, Artificial Sequence
  Probe
tgagtgaagcattggactgtaaatctaaa

SEQ ID NO: 34953 - DNA, 36 bp, Artificial Sequence
  Probe
tgagtgaagcattggactgtaaatctaaagacaggg

SEQ ID NO: 34954 - DNA, 36 bp, Artificial Sequence
  Probe
tgataaaagagttactttgatagagtaaataatagg

SEQ ID NO: 34955 - DNA, 40 bp, Artificial Sequence
  Probe
tgataaaagagttactttgatagagtaaataataggagct

SEQ ID NO: 34956 - DNA, 23 bp, Artificial Sequence
  Probe
tgatagagtaaataataggagct

SEQ ID NO: 34957 - DNA, 30 bp, Artificial Sequence
  Probe
tgatagagtaaataataggagcttaaaccc

SEQ ID NO: 34958 - DNA, 29 bp, Artificial Sequence
  Probe
tgatcgtatagtggttagtactctgcgtt

SEQ ID NO: 34959 - DNA, 21 bp, Artificial Sequence
  Probe
tgatgccgaggttgtgagttc

SEQ ID NO: 34960 - DNA, 29 bp, Artificial Sequence
  Probe
tgatgtatgctttgtttctgttgagtgtg

SEQ ID NO: 34961 - DNA, 25 bp, Artificial Sequence
  Probe
tgattagggtgcttagctgttaact

SEQ ID NO: 34962 - DNA, 36 bp, Artificial Sequence
  Probe
tgattagggtgcttagctgttaactaagtgtttgtg

SEQ ID NO: 34963 - DNA, 26 bp, Artificial Sequence
  Probe
tgattccggatcagaagattgagggt

SEQ ID NO: 34964 - DNA, 19 bp, Artificial Sequence
  Probe
tgattctcgcttagggtgc

SEQ ID NO: 34965 - DNA, 33 bp, Artificial Sequence
  Probe
tgattctcgcttagggtgcgagaggtcccgggt

SEQ ID NO: 34966 - DNA, 19 bp, Artificial Sequence
  Probe
tgattctcgcttcgggtgc

SEQ ID NO: 34967 - DNA, 33 bp, Artificial Sequence
  Probe
tgattctcgcttcgggtgcgagaggtcccgggt

SEQ ID NO: 34968 - DNA, 19 bp, Artificial Sequence
  Probe
tgattctcgctttgggtgc

SEQ ID NO: 34969 - DNA, 33 bp, Artificial Sequence
  Probe
tgattctcgctttgggtgcgagaggtcccgggt

SEQ ID NO: 34970 - DNA, 19 bp, Artificial Sequence
  Probe
tgattctcggtttgggtcc

SEQ ID NO: 34971 - DNA, 36 bp, Artificial Sequence
  Probe
tgatttcgactcattaaattatgataatcatattta

SEQ ID NO: 34972 - DNA, 16 bp, Artificial Sequence
  Probe
tgcaaaaccccactct

SEQ ID NO: 34973 - DNA, 36 bp, Artificial Sequence; identical to SEQ ID NO: 8078
  Probe

SEQ ID NO: 34974 - DNA, 21 bp, Artificial Sequence
  Probe
tgcacactactataaccaccc

SEQ ID NO: 34975 - DNA, 23 bp, Artificial Sequence
  Probe
tgcacactactataaccacccta

SEQ ID NO: 34976 - DNA, 17 bp, Artificial Sequence
  Probe
tgcacgaggccccgggt

SEQ ID NO: 34977 - DNA, 36 bp, Artificial Sequence; identical to SEQ ID NO: 14380
  Probe

SEQ ID NO: 34978 - DNA, 15 bp, Artificial Sequence
  Probe
tgcacttggacgaac

SEQ ID NO: 34979 - DNA, 16 bp, Artificial Sequence
  Probe
tgcacttggacgaacc

SEQ ID NO: 34980 - DNA, 17 bp, Artificial Sequence
  Probe
tgcacttggacgaacca

SEQ ID NO: 34981 - DNA, 22 bp, Artificial Sequence
  Probe
tgcagcgcaagtaggtctacaa

SEQ ID NO: 34982 - DNA, 36 bp, Artificial Sequence; identical to SEQ ID NO: 24248
  Probe

SEQ ID NO: 34983 - DNA, 33 bp, Artificial Sequence; identical to SEQ ID NO: 8089
  Probe

SEQ ID NO: 34984 - DNA, 36 bp, Artificial Sequence
  Probe
tgccacgcgggaggcccgggttcgattcccggccaa

SEQ ID NO: 34985 - DNA, 16 bp, Artificial Sequence
  Probe
tgcccccatgtctaac

SEQ ID NO: 34986 - DNA, 29 bp, Artificial Sequence
  Probe
tgcccccatgtctaacaacatggctttct

SEQ ID NO: 34987 - DNA, 31 bp, Artificial Sequence; identical to SEQ ID NO: 8104
  Probe

SEQ ID NO: 34988 - DNA, 33 bp, Artificial Sequence; identical to SEQ ID NO: 8106
  Probe

SEQ ID NO: 34989 - DNA, 15 bp, Artificial Sequence
  Probe
tgcccctcatttaca

SEQ ID NO: 34990 - DNA, 16 bp, Artificial Sequence
  Probe
tgcccctcatttacat

SEQ ID NO: 34991 - DNA, 17 bp, Artificial Sequence
  Probe
tgcccctcatttacata

SEQ ID NO: 34992 - DNA, 28 bp, Artificial Sequence
  Probe
tgcccctcatttacataaatattatact

SEQ ID NO: 34993 - DNA, 29 bp, Artificial Sequence
  Probe
tgcccctcatttacataaatattatacta

SEQ ID NO: 34994 - DNA, 16 bp, Artificial Sequence
  Probe
tgcccgcatcctccac

SEQ ID NO: 34995 - DNA, 17 bp, Artificial Sequence
  Probe
tgcccgcatcctccact

SEQ ID NO: 34996 - DNA, 34 bp, Artificial Sequence; identical to SEQ ID NO: 8109
  Probe

SEQ ID NO: 34997 - DNA, 35 bp, Artificial Sequence
  Probe
tgcccggctagctcagtcggtagagcatgagactc

SEQ ID NO: 34998 - DNA, 36 bp, Artificial Sequence
  Probe
tgcccggctagctcagtcggtagagcatgagactct

SEQ ID NO: 34999 - DNA, 37 bp, Artificial Sequence
  Probe
tgcccggctagctcagtcggtagagcatgagactctt

SEQ ID NO: 35000 - DNA, 34 bp, Artificial Sequence; identical to SEQ ID NO: 8110
  Probe

SEQ ID NO: 35001 - DNA, 36 bp, Artificial Sequence
  Probe
tgcccggctagctcagtcggtagagcatgggactct

SEQ ID NO: 35002 - DNA, 36 bp, Artificial Sequence
  Probe
tgccgaggttgtgagttcgagcctcacctggagcaa

SEQ ID NO: 35003 - DNA, 15 bp, Artificial Sequence
  Probe
tgccgtgatcgtata

SEQ ID NO: 35004 - DNA, 16 bp, Artificial Sequence
  Probe
tgccgtgatcgtatag

SEQ ID NO: 35005 - DNA, 22 bp, Artificial Sequence
  Probe
tgccgtgatcgtatagtggtta

SEQ ID NO: 35006 - DNA, 24 bp, Artificial Sequence
  Probe
tgccgtgatcgtatagtggttagt

SEQ ID NO: 35007 - DNA, 25 bp, Artificial Sequence
  Probe
tgccgtgatcgtatagtggttagta

SEQ ID NO: 35008 - DNA, 26 bp, Artificial Sequence
  Probe
tgccgtgatcgtatagtggttagtac

SEQ ID NO: 35009 - DNA, 27 bp, Artificial Sequence
  Probe
tgccgtgatcgtatagtggttagtact

SEQ ID NO: 35010 - DNA, 28 bp, Artificial Sequence
  Probe
tgccgtgatcgtatagtggttagtactc

SEQ ID NO: 35011 - DNA, 29 bp, Artificial Sequence
  Probe
tgccgtgatcgtatagtggttagtactct

SEQ ID NO: 35012 - DNA, 30 bp, Artificial Sequence; identical to SEQ ID NO: 12089
  Probe

SEQ ID NO: 35013 - DNA, 31 bp, Artificial Sequence; identical to SEQ ID NO: 8115
  Probe

SEQ ID NO: 35014 - DNA, 32 bp, Artificial Sequence; identical to SEQ ID NO: 8116
  Probe

SEQ ID NO: 35015 - DNA, 33 bp, Artificial Sequence; identical to SEQ ID NO: 1754
  Probe

SEQ ID NO: 35016 - DNA, 34 bp, Artificial Sequence; identical to SEQ ID NO: 8117
  Probe

SEQ ID NO: 35017 - DNA, 35 bp, Artificial Sequence; identical to SEQ ID NO: 1755
  Probe

SEQ ID NO: 35018 - DNA, 36 bp, Artificial Sequence; identical to SEQ ID NO: 1756
  Probe

SEQ ID NO: 35019 - DNA, 37 bp, Artificial Sequence; identical to SEQ ID NO: 1757
  Probe

SEQ ID NO: 35020 - DNA, 40 bp, Artificial Sequence; identical to SEQ ID NO: 24303
  Probe

SEQ ID NO: 35021 - DNA, 50 bp, Artificial Sequence
  Probe
tgccgtgatcgtatagtggttagtactctgcgttgtggccgcagcaacct

SEQ ID NO: 35022 - DNA, 30 bp, Artificial Sequence; identical to SEQ ID NO: 24306
  Probe

SEQ ID NO: 35023 - DNA, 36 bp, Artificial Sequence; identical to SEQ ID NO: 24311
  Probe

SEQ ID NO: 35024 - DNA, 15 bp, Artificial Sequence
  Probe
tgcggtaccactttt

SEQ ID NO: 35025 - DNA, 16 bp, Artificial Sequence
  Probe
tgcggtaccacttttg

SEQ ID NO: 35026 - DNA, 17 bp, Artificial Sequence
  Probe
tgctaactcatgccccc

SEQ ID NO: 35027 - DNA, 23 bp, Artificial Sequence
  Probe
tgctaactcatgcccccatgtct

SEQ ID NO: 35028 - DNA, 27 bp, Artificial Sequence
  Probe
tgctaactcatgcccccatgtctaaca

SEQ ID NO: 35029 - DNA, 30 bp, Artificial Sequence
  Probe
tgctaactcatgcccccatgtctaacaaca

SEQ ID NO: 35030 - DNA, 36 bp, Artificial Sequence; identical to SEQ ID NO: 8127
  Probe

SEQ ID NO: 35031 - DNA, 44 bp, Artificial Sequence; identical to SEQ ID NO: 8134
  Probe

SEQ ID NO: 35032 - DNA, 17 bp, Artificial Sequence
  Probe
tgctaatccattgtgct

SEQ ID NO: 35033 - DNA, 16 bp, Artificial Sequence
  Probe
tgctaatggtggagtt

SEQ ID NO: 35034 - DNA, 17 bp, Artificial Sequence
  Probe
tgctaatggtggagtta

SEQ ID NO: 35035 - DNA, 34 bp, Artificial Sequence
  Probe
tgctaatggtggagttaaagactttttctctgat

SEQ ID NO: 35036 - DNA, 15 bp, Artificial Sequence
  Probe
tgctatcggagtttt

SEQ ID NO: 35037 - DNA, 16 bp, Artificial Sequence
  Probe
tgctatcggagttttt

SEQ ID NO: 35038 - DNA, 17 bp, Artificial Sequence
  Probe
tgctatcggagtttttt

SEQ ID NO: 35039 - DNA, 19 bp, Artificial Sequence
  Probe
tgctatcggagttttttca

SEQ ID NO: 35040 - DNA, 22 bp, Artificial Sequence
  Probe
tgctcacagcgtcactagtttt

SEQ ID NO: 35041 - DNA, 26 bp, Artificial Sequence
  Probe
tgctttgcacgtatgaggccccgggt

SEQ ID NO: 35042 - DNA, 27 bp, Artificial Sequence
  Probe
tgctttgcacgtatgaggccccgggtt

SEQ ID NO: 35043 - DNA, 18 bp, Artificial Sequence
  Probe
tggaaagtgcacttggac

SEQ ID NO: 35044 - DNA, 36 bp, Artificial Sequence
  Probe
tggacgaaccagagtgtagcttaacacaaagcaccc

SEQ ID NO: 35045 - DNA, 36 bp, Artificial Sequence
  Probe
tggactgtaaatctaaagacaggggttaggcctctt

SEQ ID NO: 35046 - DNA, 27 bp, Artificial Sequence
  Probe
tggactttgaatccagcgatccgagtt

SEQ ID NO: 35047 - DNA, 36 bp, Artificial Sequence
  Probe
tggaggcgtgggttcgaatcccactcctgacagttc

SEQ ID NO: 35048 - DNA, 18 bp, Artificial Sequence
  Probe
tggataacgcgtctgact

SEQ ID NO: 35049 - DNA, 16 bp, Artificial Sequence
  Probe
tggataaggcactggc

SEQ ID NO: 35050 - DNA, 16 bp, Artificial Sequence
  Probe
tggataaggcattggc

SEQ ID NO: 35051 - DNA, 15 bp, Artificial Sequence
  Probe
tggataaggcgtctg

SEQ ID NO: 35052 - DNA, 17 bp, Artificial Sequence
  Probe
tggataaggcgtctgac

SEQ ID NO: 35053 - DNA, 18 bp, Artificial Sequence
  Probe
tggataaggcgtctgact

SEQ ID NO: 35054 - DNA, 17 bp, Artificial Sequence
  Probe
tggataaggcgtctgat

SEQ ID NO: 35055 - DNA, 18 bp, Artificial Sequence
  Probe
tggataaggcgtctgatt

SEQ ID NO: 35056 - DNA, 20 bp, Artificial Sequence
  Probe
tggataaggcgtctgattcc

SEQ ID NO: 35057 - DNA, 16 bp, Artificial Sequence
  Probe
tggatagcgcattgga

SEQ ID NO: 35058 - DNA, 17 bp, Artificial Sequence
  Probe
tggatagcgcattggac

SEQ ID NO: 35059 - DNA, 15 bp, Artificial Sequence
  Probe
tggatagggcgtggc

SEQ ID NO: 35060 - DNA, 16 bp, Artificial Sequence
  Probe
tggatagggcgtggca

SEQ ID NO: 35061 - DNA, 29 bp, Artificial Sequence
  Probe
tggatgccatagtggggcccttcacttac

SEQ ID NO: 35062 - DNA, 18 bp, Artificial Sequence
  Probe
tggcacggcaaggggctc

SEQ ID NO: 35063 - DNA, 20 bp, Artificial Sequence
  Probe
tggcagtatgtgtgcgagtg

SEQ ID NO: 35064 - DNA, 21 bp, Artificial Sequence
  Probe
tggccaacctcctactcctca

SEQ ID NO: 35065 - DNA, 20 bp, Artificial Sequence
  Probe
tggcccaacccgtcatctac

SEQ ID NO: 35066 - DNA, 23 bp, Artificial Sequence
  Probe
tggccgagcggtctaaggcgctg

SEQ ID NO: 35067 - DNA, 24 bp, Artificial Sequence
  Probe
tggccgagcggtctaaggcgctgc

SEQ ID NO: 35068 - DNA, 22 bp, Artificial Sequence
  Probe
tggccgcagcaacctcggttcg

SEQ ID NO: 35069 - DNA, 27 bp, Artificial Sequence
  Probe
tggccgcccggctagctcagtcggtag

SEQ ID NO: 35070 - DNA, 28 bp, Artificial Sequence
  Probe
tggccgcccggctagctcagtcggtaga

SEQ ID NO: 35071 - DNA, 29 bp, Artificial Sequence
  Probe
tggccgcccggctagctcagtcggtagag

SEQ ID NO: 35072 - DNA, 31 bp, Artificial Sequence; identical to SEQ ID NO: 24349
  Probe

SEQ ID NO: 35073 - DNA, 36 bp, Artificial Sequence
  Probe
tggccgcccggctagctcagtcggtagagcatgaga

SEQ ID NO: 35074 - DNA, 19 bp, Artificial Sequence
  Probe
tggcctccatgactttttc

SEQ ID NO: 35075 - DNA, 20 bp, Artificial Sequence
  Probe
tggcctccatgactttttca

SEQ ID NO: 35076 - DNA, 22 bp, Artificial Sequence
  Probe
tggcctccatgactttttcaaa

SEQ ID NO: 35077 - DNA, 27 bp, Artificial Sequence
  Probe
tggcctcctaagccagggattgtgggt

SEQ ID NO: 35078 - DNA, 15 bp, Artificial Sequence
  Probe
tggcctgtgactttt

SEQ ID NO: 35079 - DNA, 15 bp, Artificial Sequence
  Probe
tggctaggattcggc

SEQ ID NO: 35080 - DNA, 16 bp, Artificial Sequence
  Probe
tggctaggattcggcg

SEQ ID NO: 35081 - DNA, 27 bp, Artificial Sequence
  Probe
tggctaggattcggcgctttcaccgcc

SEQ ID NO: 35082 - DNA, 36 bp, Artificial Sequence
  Probe
tggctccgtggcgcaatggatagcgcattggacttc

SEQ ID NO: 35083 - DNA, 50 bp, Artificial Sequence
  Probe
tggctccgtggcgcaatggatagcgcattggacttctagaggctgaaggc

SEQ ID NO: 35084 - DNA, 21 bp, Artificial Sequence
  Probe
tggctgagtgaagcattggac

SEQ ID NO: 35085 - DNA, 22 bp, Artificial Sequence
  Probe
tggctgagtgaagcattggact

SEQ ID NO: 35086 - DNA, 24 bp, Artificial Sequence
  Probe
tggctgagtgaagcattggactgt

SEQ ID NO: 35087 - DNA, 25 bp, Artificial Sequence
  Probe
tggctgagtgaagcattggactgta

SEQ ID NO: 35088 - DNA, 26 bp, Artificial Sequence
  Probe
tggctgagtgaagcattggactgtaa

SEQ ID NO: 35089 - DNA, 27 bp, Artificial Sequence
  Probe
tggctgagtgaagcattggactgtaaa

SEQ ID NO: 35090 - DNA, 28 bp, Artificial Sequence
  Probe
tggctgagtgaagcattggactgtaaat

SEQ ID NO: 35091 - DNA, 19 bp, Artificial Sequence
  Probe
tggggtggcctgtgacttt

SEQ ID NO: 35092 - DNA, 20 bp, Artificial Sequence
  Probe
tggggtggcctgtgactttt

SEQ ID NO: 35093 - DNA, 17 bp, Artificial Sequence
  Probe
tgggtgcgagaggtccc

SEQ ID NO: 35094 - DNA, 20 bp, Artificial Sequence
  Probe
tgggtgcgagaggtcccggg

SEQ ID NO: 35095 - DNA, 22 bp, Artificial Sequence
  Probe
tgggtgcgagaggtcccgggtt

SEQ ID NO: 35096 - DNA, 20 bp, Artificial Sequence
  Probe
tgggtgctaatggtggagtt

SEQ ID NO: 35097 - DNA, 21 bp, Artificial Sequence
  Probe
tgggtgctaatggtggagtta

SEQ ID NO: 35098 - DNA, 36 bp, Artificial Sequence
  Probe
tgggtgctaatggtggagttaaagactttttctctg

SEQ ID NO: 35099 - DNA, 15 bp, Artificial Sequence
  Probe
tgggtggttcagtgg

SEQ ID NO: 35100 - DNA, 17 bp, Artificial Sequence
  Probe
tgggtggttcagtggta

SEQ ID NO: 35101 - DNA, 27 bp, Artificial Sequence
  Probe
tgggtggttcagtggtagaattctcgc

SEQ ID NO: 35102 - DNA, 28 bp, Artificial Sequence
  Probe
tgggtggttcagtggtagaattctcgcc

SEQ ID NO: 35103 - DNA, 29 bp, Artificial Sequence
  Probe
tgggtggttcagtggtagaattctcgcct

SEQ ID NO: 35104 - DNA, 36 bp, Artificial Sequence
  Probe
tgggtggttcagtggtagaattctcgcctgccacgc

SEQ ID NO: 35105 - DNA, 23 bp, Artificial Sequence
  Probe
tgggttcgagccccacgttgggc

SEQ ID NO: 35106 - DNA, 21 bp, Artificial Sequence
  Probe
tgggtttaagtcccattggtc

SEQ ID NO: 35107 - DNA, 25 bp, Artificial Sequence
  Probe
tgggtttaagtcccattggtctagt

SEQ ID NO: 35108 - DNA, 15 bp, Artificial Sequence
  Probe
tggtagaattctcgc

SEQ ID NO: 35109 - DNA, 16 bp, Artificial Sequence
  Probe
tggtagaattctcgcc

SEQ ID NO: 35110 - DNA, 17 bp, Artificial Sequence
  Probe
tggtagaattctcgcct

SEQ ID NO: 35111 - DNA, 19 bp, Artificial Sequence
  Probe
tggtagaattctcgcctcc

SEQ ID NO: 35112 - DNA, 33 bp, Artificial Sequence
  Probe
tggtagaattctcgcctcccacgcgggagaccc

SEQ ID NO: 35113 - DNA, 36 bp, Artificial Sequence
  Probe
tggtagaattctcgcctcccacgcgggagacccggg

SEQ ID NO: 35114 - DNA, 18 bp, Artificial Sequence
  Probe
tggtagaattctcgcctg

SEQ ID NO: 35115 - DNA, 19 bp, Artificial Sequence
  Probe
tggtagaattctcgcctgc

SEQ ID NO: 35116 - DNA, 20 bp, Artificial Sequence
  Probe
tggtagaattctcgcctgcc

SEQ ID NO: 35117 - DNA, 21 bp, Artificial Sequence
  Probe
tggtagaattctcgcctgcca

SEQ ID NO: 35118 - DNA, 22 bp, Artificial Sequence
  Probe
tggtagaattctcgcctgccac

SEQ ID NO: 35119 - DNA, 27 bp, Artificial Sequence
  Probe
tggtagaattctcgcctgccacgcggg

SEQ ID NO: 35120 - DNA, 32 bp, Artificial Sequence
  Probe
tggtagaattctcgcctgccacgcgggaggcc

SEQ ID NO: 35121 - DNA, 34 bp, Artificial Sequence; identical to SEQ ID NO: 24375
  Probe

SEQ ID NO: 35122 - DNA, 37 bp, Artificial Sequence; identical to SEQ ID NO: 24376
  Probe

SEQ ID NO: 35123 - DNA, 38 bp, Artificial Sequence; identical to SEQ ID NO: 24377
  Probe

SEQ ID NO: 35124 - DNA, 17 bp, Artificial Sequence
  Probe
tggtagagcatttgact

SEQ ID NO: 35125 - DNA, 19 bp, Artificial Sequence
  Probe
tggtagagcatttgactgc

SEQ ID NO: 35126 - DNA, 15 bp, Artificial Sequence
  Probe
tggtagagcgcatgc

SEQ ID NO: 35127 - DNA, 16 bp, Artificial Sequence
  Probe
tggtagagcgcatgct

SEQ ID NO: 35128 - DNA, 15 bp, Artificial Sequence
  Probe
tggtagagcgcgtgc

SEQ ID NO: 35129 - DNA, 16 bp, Artificial Sequence
  Probe
tggtagagcgcgtgct

SEQ ID NO: 35130 - DNA, 20 bp, Artificial Sequence
  Probe
tggtagagcgcgtgcttagc

SEQ ID NO: 35131 - DNA, 20 bp, Artificial Sequence
  Probe
tggtagagcgcgtgcttcgc

SEQ ID NO: 35132 - DNA, 15 bp, Artificial Sequence
  Probe
tggtagagcgctcgc

SEQ ID NO: 35133 - DNA, 16 bp, Artificial Sequence
  Probe
tggtagagcgctcgct

SEQ ID NO: 35134 - DNA, 15 bp, Artificial Sequence
  Probe
tggtagagcggagga

SEQ ID NO: 35135 - DNA, 16 bp, Artificial Sequence
  Probe
tggtagagcggaggac

SEQ ID NO: 35136 - DNA, 17 bp, Artificial Sequence
  Probe
tggtagagcggaggact

SEQ ID NO: 35137 - DNA, 18 bp, Artificial Sequence
  Probe
tggtagagcggaggactg

SEQ ID NO: 35138 - DNA, 20 bp, Artificial Sequence
  Probe
tggtagagcggaggactgta

SEQ ID NO: 35139 - DNA, 21 bp, Artificial Sequence
  Probe
tggtagagcggaggactgtag

SEQ ID NO: 35140 - DNA, 15 bp, Artificial Sequence
  Probe
tggtagcgcgtctga

SEQ ID NO: 35141 - DNA, 37 bp, Artificial Sequence; identical to SEQ ID NO: 1772
  Probe

SEQ ID NO: 35142 - DNA, 38 bp, Artificial Sequence; identical to SEQ ID NO: 8175
  Probe

SEQ ID NO: 35143 - DNA, 15 bp, Artificial Sequence
  Probe
tggtatgattctcgc

SEQ ID NO: 35144 - DNA, 16 bp, Artificial Sequence
  Probe
tggtatgattctcgct

SEQ ID NO: 35145 - DNA, 16 bp, Artificial Sequence
  Probe
tggtcatcacgttcgc

SEQ ID NO: 35146 - DNA, 17 bp, Artificial Sequence
  Probe
tggtcatcacgttcgcc

SEQ ID NO: 35147 - DNA, 24 bp, Artificial Sequence
  Probe
tggtcatcacgttcgcctaacacg

SEQ ID NO: 35148 - DNA, 22 bp, Artificial Sequence
  Probe
tggtcctagcctttctattagc

SEQ ID NO: 35149 - DNA, 15 bp, Artificial Sequence
  Probe
tggtcgtggttgtag

SEQ ID NO: 35150 - DNA, 16 bp, Artificial Sequence
  Probe
tggtcgtggttgtagt

SEQ ID NO: 35151 - DNA, 17 bp, Artificial Sequence
  Probe
tggtcgtggttgtagtc

SEQ ID NO: 35152 - DNA, 18 bp, Artificial Sequence
  Probe
tggtcgtggttgtagtcc

SEQ ID NO: 35153 - DNA, 19 bp, Artificial Sequence
  Probe
tggtcgtggttgtagtccg

SEQ ID NO: 35154 - DNA, 21 bp, Artificial Sequence
  Probe
tggtcgtggttgtagtccgtg

SEQ ID NO: 35155 - DNA, 23 bp, Artificial Sequence
  Probe
tggtcgtggttgtagtccgtgcg

SEQ ID NO: 35156 - DNA, 24 bp, Artificial Sequence
  Probe
tggtcgtggttgtagtccgtgcga

SEQ ID NO: 35157 - DNA, 25 bp, Artificial Sequence
  Probe
tggtcgtggttgtagtccgtgcgag

SEQ ID NO: 35158 - DNA, 30 bp, Artificial Sequence; identical to SEQ ID NO: 12156
  Probe

SEQ ID NO: 35159 - DNA, 21 bp, Artificial Sequence
  Probe
tggtctagcggttaggattcc

SEQ ID NO: 35160 - DNA, 35 bp, Artificial Sequence
  Probe
tggtctagcggttaggattcctggttttcacccag

SEQ ID NO: 35161 - DNA, 36 bp, Artificial Sequence
  Probe
tggtctagcggttaggattcctggttttcacccagg

SEQ ID NO: 35162 - DNA, 15 bp, Artificial Sequence
  Probe
tggtctaggggtatg

SEQ ID NO: 35163 - DNA, 16 bp, Artificial Sequence
  Probe
tggtctaggggtatga

SEQ ID NO: 35164 - DNA, 17 bp, Artificial Sequence
  Probe
tggtctaggggtatgat

SEQ ID NO: 35165 - DNA, 19 bp, Artificial Sequence
  Probe
tggtctaggggtatgattc

SEQ ID NO: 35166 - DNA, 20 bp, Artificial Sequence
  Probe
tggtctaggggtatgattct

SEQ ID NO: 35167 - DNA, 21 bp, Artificial Sequence
  Probe
tggtctaggggtatgattctc

SEQ ID NO: 35168 - DNA, 22 bp, Artificial Sequence
  Probe
tggtctaggggtatgattctcg

SEQ ID NO: 35169 - DNA, 23 bp, Artificial Sequence
  Probe
tggtctaggggtatgattctcgc

SEQ ID NO: 35170 - DNA, 24 bp, Artificial Sequence
  Probe
tggtctaggggtatgattctcgct

SEQ ID NO: 35171 - DNA, 25 bp, Artificial Sequence
  Probe
tggtctaggggtatgattctcgctt

SEQ ID NO: 35172 - DNA, 23 bp, Artificial Sequence
  Probe
tggtctaggggtatgattctcgg

SEQ ID NO: 35173 - DNA, 24 bp, Artificial Sequence
  Probe
tggtctaggggtatgattctcggt

SEQ ID NO: 35174 - DNA, 27 bp, Artificial Sequence
  Probe
tggtctagtggttaggattcggcgctc

SEQ ID NO: 35175 - DNA, 36 bp, Artificial Sequence
  Probe
tggtctagtggttaggattcggcgctctcaccgccg

SEQ ID NO: 35176 - DNA, 16 bp, Artificial Sequence
  Probe
tggtgagcactctgga

SEQ ID NO: 35177 - DNA, 36 bp, Artificial Sequence
  Probe
tggtgagcactctggactctgaatccagcgatccga

SEQ ID NO: 35178 - DNA, 16 bp, Artificial Sequence
  Probe
tggtgagcatagctgc

SEQ ID NO: 35179 - DNA, 15 bp, Artificial Sequence
  Probe
tggtgagtatccccg

SEQ ID NO: 35180 - DNA, 16 bp, Artificial Sequence
  Probe
tggtgagtatccccgc

SEQ ID NO: 35181 - DNA, 17 bp, Artificial Sequence
  Probe
tggtgagtatccccgcc

SEQ ID NO: 35182 - DNA, 21 bp, Artificial Sequence
  Probe
tggtgagtatccccgcctgtc

SEQ ID NO: 35183 - DNA, 23 bp, Artificial Sequence
  Probe
tggtgagtatccccgcctgtcac

SEQ ID NO: 35184 - DNA, 36 bp, Artificial Sequence; identical to SEQ ID NO: 24418
  Probe

SEQ ID NO: 35185 - DNA, 28 bp, Artificial Sequence
  Probe
tggtgctaataacgccaaggtcgcgggt

SEQ ID NO: 35186 - DNA, 29 bp, Artificial Sequence
  Probe
tggtgctaataacgccaaggtcgcgggtt

SEQ ID NO: 35187 - DNA, 28 bp, Artificial Sequence
  Probe
tggtgctaataacgctaaggtcgcgggt

SEQ ID NO: 35188 - DNA, 28 bp, Artificial Sequence
  Probe
tggtggagttaaagactttttctctgat

SEQ ID NO: 35189 - DNA, 50 bp, Artificial Sequence
  Probe
tggtggtatagtggtaagcatagctgccttccaagcagttgacccgggtt

SEQ ID NO: 35190 - DNA, 36 bp, Artificial Sequence
  Probe
tggtggtatagtggtgagcatagctgccttccaagc

SEQ ID NO: 35191 - DNA, 50 bp, Artificial Sequence
  Probe
tggtggtatagtggtgagcatagctgccttccaagcagttgacccgggtt

SEQ ID NO: 35192 - DNA, 29 bp, Artificial Sequence
  Probe
tggtggtctagtggttaggattcggcgct

SEQ ID NO: 35193 - DNA, 30 bp, Artificial Sequence; identical to SEQ ID NO: 14419
  Probe

SEQ ID NO: 35194 - DNA, 35 bp, Artificial Sequence
  Probe
tggtggtctagtggttaggattcggcgctctcacc

SEQ ID NO: 35195 - DNA, 36 bp, Artificial Sequence
  Probe
tggtggtctagtggttaggattcggcgctctcaccg

SEQ ID NO: 35196 - DNA, 26 bp, Artificial Sequence
  Probe
tggtggttcagtggtagaattctcgc

SEQ ID NO: 35197 - DNA, 27 bp, Artificial Sequence
  Probe
tggtggttcagtggtagaattctcgcc

SEQ ID NO: 35198 - DNA, 28 bp, Artificial Sequence
  Probe
tggtggttcagtggtagaattctcgcct

SEQ ID NO: 35199 - DNA, 36 bp, Artificial Sequence
  Probe
tggtggttcagtggtagaattctcgcctcccacgcg

SEQ ID NO: 35200 - DNA, 31 bp, Artificial Sequence; identical to SEQ ID NO: 8197
  Probe

SEQ ID NO: 35201 - DNA, 36 bp, Artificial Sequence
  Probe
tggtggttcagtggtagaattctcgcctgccacgcg

SEQ ID NO: 35202 - DNA, 16 bp, Artificial Sequence
  Probe
tggtgtaatggttagc

SEQ ID NO: 35203 - DNA, 23 bp, Artificial Sequence
  Probe
tggtgtaatggttagcactctgg

SEQ ID NO: 35204 - DNA, 24 bp, Artificial Sequence
  Probe
tggtgtaatggttagcactctgga

SEQ ID NO: 35205 - DNA, 25 bp, Artificial Sequence
  Probe
tggtgtaatggttagcactctggac

SEQ ID NO: 35206 - DNA, 26 bp, Artificial Sequence
  Probe
tggtgtaatggttagcactctggact

SEQ ID NO: 35207 - DNA, 27 bp, Artificial Sequence
  Probe
tggtgtaatggttagcactctggactc

SEQ ID NO: 35208 - DNA, 31 bp, Artificial Sequence
  Probe
tggtgtaatggttagcactctggactctgaa

SEQ ID NO: 35209 - DNA, 34 bp, Artificial Sequence
  Probe
tggtgtaatggttagcactctggactctgaatcc

SEQ ID NO: 35210 - DNA, 35 bp, Artificial Sequence
  Probe
tggtgtaatggttagcactctggactctgaatcca

SEQ ID NO: 35211 - DNA, 45 bp, Artificial Sequence
  Probe
tggtgtaatggttagcactctggactctgaatccagcgatccgag

SEQ ID NO: 35212 - DNA, 46 bp, Artificial Sequence
  Probe
tggtgtaatggttagcactctggactctgaatccagcgatccgagt

SEQ ID NO: 35213 - DNA, 47 bp, Artificial Sequence
  Probe
tggtgtaatggttagcactctggactctgaatccagcgatccgagtt

SEQ ID NO: 35214 - DNA, 36 bp, Artificial Sequence
  Probe
tggtgtaatggttagcactctggactctgaatccgg

SEQ ID NO: 35215 - DNA, 34 bp, Artificial Sequence
  Probe
tggtgtaatggttagcactctggactttgaatcc

SEQ ID NO: 35216 - DNA, 36 bp, Artificial Sequence
  Probe
tggtgtaatggttagcactctggactttgaatccag

SEQ ID NO: 35217 - DNA, 17 bp, Artificial Sequence
  Probe
tggtgtggtctgttgtt

SEQ ID NO: 35218 - DNA, 18 bp, Artificial Sequence
  Probe
tggtgtggtctgttgttt

SEQ ID NO: 35219 - DNA, 19 bp, Artificial Sequence
  Probe
tggtgtggtctgttgtttt

SEQ ID NO: 35220 - DNA, 20 bp, Artificial Sequence
  Probe
tggtgtggtctgttgttttc

SEQ ID NO: 35221 - DNA, 17 bp, Artificial Sequence
  Probe
tggttaaggcgatggac

SEQ ID NO: 35222 - DNA, 17 bp, Artificial Sequence
  Probe
tggttaaggcgttggac

SEQ ID NO: 35223 - DNA, 15 bp, Artificial Sequence
  Probe
tggttagcactctgg

SEQ ID NO: 35224 - DNA, 16 bp, Artificial Sequence
  Probe
tggttagcactctgga

SEQ ID NO: 35225 - DNA, 17 bp, Artificial Sequence
  Probe
tggttagcactctggac

SEQ ID NO: 35226 - DNA, 18 bp, Artificial Sequence
  Probe
tggttagcactctggact

SEQ ID NO: 35227 - DNA, 19 bp, Artificial Sequence
  Probe
tggttagcactctggactc

SEQ ID NO: 35228 - DNA, 22 bp, Artificial Sequence
  Probe
tggttagcactctggactctga

SEQ ID NO: 35229 - DNA, 23 bp, Artificial Sequence
  Probe
tggttagcactctggactctgaa

SEQ ID NO: 35230 - DNA, 26 bp, Artificial Sequence
  Probe
tggttagcactctggactctgaatcc

SEQ ID NO: 35231 - DNA, 27 bp, Artificial Sequence
  Probe
tggttagcactctggactctgaatcca

SEQ ID NO: 35232 - DNA, 37 bp, Artificial Sequence
  Probe
tggttagcactctggactctgaatccagcgatccgag

SEQ ID NO: 35233 - DNA, 38 bp, Artificial Sequence; identical to SEQ ID NO: 24441
  Probe

SEQ ID NO: 35234 - DNA, 39 bp, Artificial Sequence
  Probe
tggttagcactctggactctgaatccagcgatccgagtt

SEQ ID NO: 35235 - DNA, 24 bp, Artificial Sequence
  Probe
tggttagcactctggactttgaat

SEQ ID NO: 35236 - DNA, 25 bp, Artificial Sequence
  Probe
tggttagcactctggactttgaatc

SEQ ID NO: 35237 - DNA, 26 bp, Artificial Sequence
  Probe
tggttagcactctggactttgaatcc

SEQ ID NO: 35238 - DNA, 36 bp, Artificial Sequence
  Probe
tggttagcactctggactttgaatccagcgatccga

SEQ ID NO: 35239 - DNA, 39 bp, Artificial Sequence
  Probe
tggttagcactctggactttgaatccagcgatccgagtt

SEQ ID NO: 35240 - DNA, 27 bp, Artificial Sequence
  Probe
tggttaggagtcggcactctcaccgcc

SEQ ID NO: 35241 - DNA, 15 bp, Artificial Sequence
  Probe
tggttaggattcggc

SEQ ID NO: 35242 - DNA, 20 bp, Artificial Sequence
  Probe
tggttaggattcggcgctct

SEQ ID NO: 35243 - DNA, 22 bp, Artificial Sequence
  Probe
tggttaggattcggcgctctca

SEQ ID NO: 35244 - DNA, 23 bp, Artificial Sequence
  Probe
tggttaggattcggcgctctcac

SEQ ID NO: 35245 - DNA, 25 bp, Artificial Sequence
  Probe
tggttaggattcggcgctctcaccg

SEQ ID NO: 35246 - DNA, 26 bp, Artificial Sequence
  Probe
tggttaggattcggcgctctcaccgc

SEQ ID NO: 35247 - DNA, 28 bp, Artificial Sequence
  Probe
tggttaggattcggcgctctcaccgccg

SEQ ID NO: 35248 - DNA, 29 bp, Artificial Sequence
  Probe
tggttaggattcggcgctctcaccgccgc

SEQ ID NO: 35249 - DNA, 33 bp, Artificial Sequence; identical to SEQ ID NO: 24446
  Probe

SEQ ID NO: 35250 - DNA, 38 bp, Artificial Sequence; identical to SEQ ID NO: 24448
  Probe

SEQ ID NO: 35251 - DNA, 15 bp, Artificial Sequence
  Probe
tggttagtactctgc

SEQ ID NO: 35252 - DNA, 16 bp, Artificial Sequence
  Probe
tggttagtactctgcg

SEQ ID NO: 35253 - DNA, 16 bp, Artificial Sequence
  Probe
tggttagtatccccgc

SEQ ID NO: 35254 - DNA, 17 bp, Artificial Sequence
  Probe
tggttatcacgtctgct

SEQ ID NO: 35255 - DNA, 25 bp, Artificial Sequence
  Probe
tggttatcacgtctgctttacacgc

SEQ ID NO: 35256 - DNA, 16 bp, Artificial Sequence
  Probe
tggttatcacgttcgc

SEQ ID NO: 35257 - DNA, 17 bp, Artificial Sequence
  Probe
tggttatcacgttcgcc

SEQ ID NO: 35258 - DNA, 24 bp, Artificial Sequence
  Probe
tggttatcacgttcgcctaacacg

SEQ ID NO: 35259 - DNA, 25 bp, Artificial Sequence
  Probe
tggttatcacgttcgcctaacacgc

SEQ ID NO: 35260 - DNA, 24 bp, Artificial Sequence
  Probe
tggttatcacgttcgcctcacacg

SEQ ID NO: 35261 - DNA, 25 bp, Artificial Sequence
  Probe
tggttatcacgttcgcctcacacgc

SEQ ID NO: 35262 - DNA, 23 bp, Artificial Sequence
  Probe
tggttcagtggtagaattctcgc

SEQ ID NO: 35263 - DNA, 24 bp, Artificial Sequence
  Probe
tggttcagtggtagaattctcgcc

SEQ ID NO: 35264 - DNA, 25 bp, Artificial Sequence
  Probe
tggttcagtggtagaattctcgcct

SEQ ID NO: 35265 - DNA, 27 bp, Artificial Sequence
  Probe
tggttcagtggtagaattctcgcctcc

SEQ ID NO: 35266 - DNA, 28 bp, Artificial Sequence
  Probe
tggttcagtggtagaattctcgcctgcc

SEQ ID NO: 35267 - DNA, 29 bp, Artificial Sequence
  Probe
tggttcagtggtagaattctcgcctgcca

SEQ ID NO: 35268 - DNA, 30 bp, Artificial Sequence
  Probe
tggttcagtggtagaattctcgcctgccac

SEQ ID NO: 35269 - DNA, 31 bp, Artificial Sequence
  Probe
tggttcagtggtagaattctcgcctgccacg

SEQ ID NO: 35270 - DNA, 36 bp, Artificial Sequence
  Probe
tggttcagtggtagaattctcgcctgccacgcggga

SEQ ID NO: 35271 - DNA, 45 bp, Artificial Sequence
  Probe
tggttcagtggtagaattctcgcctgccacgcgggaggcccgggt

SEQ ID NO: 35272 - DNA, 17 bp, Artificial Sequence
  Probe
tggttgtagtccgtgcg

SEQ ID NO: 35273 - DNA, 19 bp, Artificial Sequence
  Probe
tggttgtagtccgtgcgag

SEQ ID NO: 35274 - DNA, 24 bp, Artificial Sequence
  Probe
tggttgtagtccgtgcgagaataa

SEQ ID NO: 35275 - DNA, 36 bp, Artificial Sequence
  Probe
tggttttcacccaggcggcccgggttcgactcccgg

SEQ ID NO: 35276 - DNA, 33 bp, Artificial Sequence
  Probe
tggtttttcatatcattggtcgtggttgtagtc

SEQ ID NO: 35277 - DNA, 20 bp, Artificial Sequence
  Probe
tgtaaaccggagatgaaaac

SEQ ID NO: 35278 - DNA, 22 bp, Artificial Sequence
  Probe
tgtaaaccggagatgaaaacct

SEQ ID NO: 35279 - DNA, 36 bp, Artificial Sequence; identical to SEQ ID NO: 8220
  Probe

SEQ ID NO: 35280 - DNA, 33 bp, Artificial Sequence; identical to SEQ ID NO: 8227
  Probe

SEQ ID NO: 35281 - DNA, 36 bp, Artificial Sequence
  Probe
tgtaaatatagtttaaccaaaacatcagattgtgaa

SEQ ID NO: 35282 - DNA, 38 bp, Artificial Sequence; identical to SEQ ID NO: 8229
  Probe

SEQ ID NO: 35283 - DNA, 50 bp, Artificial Sequence; identical to SEQ ID NO: 8238
  Probe

SEQ ID NO: 35284 - DNA, 36 bp, Artificial Sequence
  Probe
tgtaaatctaaagacaggggttaggcctctttttac

SEQ ID NO: 35285 - DNA, 21 bp, Artificial Sequence
  Probe
tgtaatggtgagcactctgga

SEQ ID NO: 35286 - DNA, 29 bp, Artificial Sequence
  Probe
tgtaatggtgagcactctggactctgaat

SEQ ID NO: 35287 - DNA, 17 bp, Artificial Sequence
  Probe
tgtaatggttagcactc

SEQ ID NO: 35288 - DNA, 20 bp, Artificial Sequence
  Probe
tgtaatggttagcactctgg

SEQ ID NO: 35289 - DNA, 21 bp, Artificial Sequence
  Probe
tgtaatggttagcactctgga

SEQ ID NO: 35290 - DNA, 22 bp, Artificial Sequence
  Probe
tgtaatggttagcactctggac

SEQ ID NO: 35291 - DNA, 23 bp, Artificial Sequence
  Probe
tgtaatggttagcactctggact

SEQ ID NO: 35292 - DNA, 24 bp, Artificial Sequence
  Probe
tgtaatggttagcactctggactc

SEQ ID NO: 35293 - DNA, 27 bp, Artificial Sequence
  Probe
tgtaatggttagcactctggactctga

SEQ ID NO: 35294 - DNA, 28 bp, Artificial Sequence
  Probe
tgtaatggttagcactctggactctgaa

SEQ ID NO: 35295 - DNA, 43 bp, Artificial Sequence
  Probe
tgtaatggttagcactctggactctgaatccagcgatccgagt

SEQ ID NO: 35296 - DNA, 44 bp, Artificial Sequence
  Probe
tgtaatggttagcactctggactctgaatccagcgatccgagtt

SEQ ID NO: 35297 - DNA, 28 bp, Artificial Sequence
  Probe
tgtaatggttagcactctggactttgaa

SEQ ID NO: 35298 - DNA, 29 bp, Artificial Sequence
  Probe
tgtaatggttagcactctggactttgaat

SEQ ID NO: 35299 - DNA, 31 bp, Artificial Sequence
  Probe
tgtaatggttagcactctggactttgaatcc

SEQ ID NO: 35300 - DNA, 32 bp, Artificial Sequence
  Probe
tgtaatggttagcactctggactttgaatcca

SEQ ID NO: 35301 - DNA, 36 bp, Artificial Sequence
  Probe
tgtaatggttagcactctggactttgaatccagcga

SEQ ID NO: 35302 - DNA, 43 bp, Artificial Sequence
  Probe
tgtaatggttagcactctggactttgaatccagcgatccgagt

SEQ ID NO: 35303 - DNA, 44 bp, Artificial Sequence
  Probe
tgtaatggttagcactctggactttgaatccagcgatccgagtt

SEQ ID NO: 35304 - DNA, 23 bp, Artificial Sequence
  Probe
tgtactggaaagtgcacttggac

SEQ ID NO: 35305 - DNA, 24 bp, Artificial Sequence
  Probe
tgtactggaaagtgcacttggacg

SEQ ID NO: 35306 - DNA, 27 bp, Artificial Sequence
  Probe
tgtactggaaagtgcacttggacgaac

SEQ ID NO: 35307 - DNA, 28 bp, Artificial Sequence
  Probe
tgtactggaaagtgcacttggacgaacc

SEQ ID NO: 35308 - DNA, 22 bp, Artificial Sequence
  Probe
tgtagcttaacacaaagcaccc

SEQ ID NO: 35309 - DNA, 15 bp, Artificial Sequence
  Probe
tgtagcttacctcct

SEQ ID NO: 35310 - DNA, 17 bp, Artificial Sequence
  Probe
tgtagtccgtgcgagaa

SEQ ID NO: 35311 - DNA, 18 bp, Artificial Sequence
  Probe
tgtagtccgtgcgagaat

SEQ ID NO: 35312 - DNA, 19 bp, Artificial Sequence
  Probe
tgtagtccgtgcgagaata

SEQ ID NO: 35313 - DNA, 20 bp, Artificial Sequence
  Probe
tgtagtccgtgcgagaataa

SEQ ID NO: 35314 - DNA, 16 bp, Artificial Sequence
  Probe
tgtagtcgtggccgag

SEQ ID NO: 35315 - DNA, 23 bp, Artificial Sequence
  Probe
tgtagtggtcatcacgttcgcct

SEQ ID NO: 35316 - DNA, 22 bp, Artificial Sequence
  Probe
tgtagtggttatcacgttcgcc

SEQ ID NO: 35317 - DNA, 23 bp, Artificial Sequence
  Probe
tgtagtggttatcacgttcgcct

SEQ ID NO: 35318 - DNA, 36 bp, Artificial Sequence
  Probe
tgtagttgaaatacaacgatggtttttcatatcatt

SEQ ID NO: 35319 - DNA, 17 bp, Artificial Sequence
  Probe
tgtatgaggccccgggt

SEQ ID NO: 35320 - DNA, 15 bp, Artificial Sequence
  Probe
tgtatgtctccatct

SEQ ID NO: 35321 - DNA, 20 bp, Artificial Sequence
  Probe
tgtatgtctccatctattga

SEQ ID NO: 35322 - DNA, 22 bp, Artificial Sequence
  Probe
tgtatgtctccatctattgatg

SEQ ID NO: 35323 - DNA, 31 bp, Artificial Sequence; identical to SEQ ID NO: 8251
  Probe

SEQ ID NO: 35324 - DNA, 15 bp, Artificial Sequence
  Probe
tgtcacgcgggagac

SEQ ID NO: 35325 - DNA, 21 bp, Artificial Sequence
  Probe
tgtcacgcgggagaccggggt

SEQ ID NO: 35326 - DNA, 36 bp, Artificial Sequence; identical to SEQ ID NO: 14453
  Probe

SEQ ID NO: 35327 - DNA, 28 bp, Artificial Sequence
  Probe
tgtccttggaaaaaggttttcatctccg

SEQ ID NO: 35328 - DNA, 19 bp, Artificial Sequence
  Probe
tgtccttgtagtataaact

SEQ ID NO: 35329 - DNA, 17 bp, Artificial Sequence
  Probe
tgtcgcccggctagctc

SEQ ID NO: 35330 - DNA, 26 bp, Artificial Sequence
  Probe
tgtcgcccggctagctcagtcggtag

SEQ ID NO: 35331 - DNA, 36 bp, Artificial Sequence
  Probe
tgtcgcccggctagctcagtcggtagagcatgagac

SEQ ID NO: 35332 - DNA, 36 bp, Artificial Sequence
  Probe
tgtcggctcgttggtctaggggtatgattctcgctt

SEQ ID NO: 35333 - DNA, 25 bp, Artificial Sequence
  Probe
tgtctaacaacatggctttctcaac

SEQ ID NO: 35334 - DNA, 29 bp, Artificial Sequence
  Probe
tgtgaatctgacaacagaggcttacgacc

SEQ ID NO: 35335 - DNA, 30 bp, Artificial Sequence; identical to SEQ ID NO: 24530
  Probe

SEQ ID NO: 35336 - DNA, 32 bp, Artificial Sequence; identical to SEQ ID NO: 8265
  Probe

SEQ ID NO: 35337 - DNA, 29 bp, Artificial Sequence
  Probe
tgtgaggacaatggcacggcaaggggagt

SEQ ID NO: 35338 - DNA, 19 bp, Artificial Sequence
  Probe
tgtgctccggagttacctc

SEQ ID NO: 35339 - DNA, 20 bp, Artificial Sequence
  Probe
tgtgctccggagttacctcg

SEQ ID NO: 35340 - DNA, 21 bp, Artificial Sequence
  Probe
tgtgctccggagttacctcgt

SEQ ID NO: 35341 - DNA, 22 bp, Artificial Sequence
  Probe
tgtgctccggagttacctcgtt

SEQ ID NO: 35342 - DNA, 23 bp, Artificial Sequence
  Probe
tgtgctccggagttacctcgttt

SEQ ID NO: 35343 - DNA, 24 bp, Artificial Sequence
  Probe
tgtgctccggagttacctcgtttt

SEQ ID NO: 35344 - DNA, 25 bp, Artificial Sequence
  Probe
tgtgctccggagttacctcgttttg

SEQ ID NO: 35345 - DNA, 29 bp, Artificial Sequence
  Probe
tgtggaaacaatggtacggcaagggcctc

SEQ ID NO: 35346 - DNA, 29 bp, Artificial Sequence
  Probe
tgtgggaacaatggcacggcaaggggctc

SEQ ID NO: 35347 - DNA, 23 bp, Artificial Sequence
  Probe
tgtgggtttaagtcccattggtc

SEQ ID NO: 35348 - DNA, 27 bp, Artificial Sequence
  Probe
tgtgggtttaagtcccattggtctagt

SEQ ID NO: 35349 - DNA, 33 bp, Artificial Sequence
  Probe
tgttaactaagtgtttgtgggtttaagtcccat

SEQ ID NO: 35350 - DNA, 18 bp, Artificial Sequence
  Probe
tgttaagatggcagagcc

SEQ ID NO: 35351 - DNA, 19 bp, Artificial Sequence
  Probe
tgttaagatggcagagccc

SEQ ID NO: 35352 - DNA, 36 bp, Artificial Sequence
  Probe
tgttaagatggcagagcccggtaatcgcataaaact

SEQ ID NO: 35353 - DNA, 43 bp, Artificial Sequence
  Probe
tgttaagatggcagagcccggtaatcgcataaaacttaaaact

SEQ ID NO: 35354 - DNA, 15 bp, Artificial Sequence
  Probe
tgtttagacgggctc

SEQ ID NO: 35355 - DNA, 16 bp, Artificial Sequence
  Probe
tgtttagacgggctca

SEQ ID NO: 35356 - DNA, 17 bp, Artificial Sequence
  Probe
tgtttagacgggctcac

SEQ ID NO: 35357 - DNA, 18 bp, Artificial Sequence
  Probe
tgtttagacgggctcaca

SEQ ID NO: 35358 - DNA, 19 bp, Artificial Sequence
  Probe
tgtttagacgggctcacat

SEQ ID NO: 35359 - DNA, 20 bp, Artificial Sequence
  Probe
tgtttagacgggctcacatc

SEQ ID NO: 35360 - DNA, 21 bp, Artificial Sequence
  Probe
tgtttagacgggctcacatca

SEQ ID NO: 35361 - DNA, 22 bp, Artificial Sequence
  Probe
tgtttagacgggctcacatcac

SEQ ID NO: 35362 - DNA, 23 bp, Artificial Sequence
  Probe
tgtttagacgggctcacatcacc

SEQ ID NO: 35363 - DNA, 24 bp, Artificial Sequence
  Probe
tgtttagacgggctcacatcaccc

SEQ ID NO: 35364 - DNA, 25 bp, Artificial Sequence
  Probe
tgtttagacgggctcacatcacccc

SEQ ID NO: 35365 - DNA, 26 bp, Artificial Sequence
  Probe
tgtttagacgggctcacatcacccca

SEQ ID NO: 35366 - DNA, 28 bp, Artificial Sequence
  Probe
tgtttagacgggctcacatcaccccata

SEQ ID NO: 35367 - DNA, 29 bp, Artificial Sequence
  Probe
tgtttagacgggctcacatcaccccataa

SEQ ID NO: 35368 - DNA, 30 bp, Artificial Sequence
  Probe
tgtttagacgggctcacatcaccccataaa

SEQ ID NO: 35369 - DNA, 34 bp, Artificial Sequence
  Probe
tgtttccgtagtgtagtggttatcacgttcgcct

SEQ ID NO: 35370 - DNA, 27 bp, Artificial Sequence
  Probe
tgtttgtgggtttaagtcccattggtc

SEQ ID NO: 35371 - DNA, 31 bp, Artificial Sequence; identical to SEQ ID NO: 8293
  Probe

SEQ ID NO: 35372 - DNA, 18 bp, Artificial Sequence
  Probe
ttaaagattaagagaacc

SEQ ID NO: 35373 - DNA, 19 bp, Artificial Sequence
  Probe
ttaaagattaagagaacca

SEQ ID NO: 35374 - DNA, 21 bp, Artificial Sequence
  Probe
ttaaagattaagagaaccaac

SEQ ID NO: 35375 - DNA, 23 bp, Artificial Sequence
  Probe
ttaaagattaagagaaccaacac

SEQ ID NO: 35376 - DNA, 24 bp, Artificial Sequence
  Probe
ttaaagattaagagaaccaacacc

SEQ ID NO: 35377 - DNA, 25 bp, Artificial Sequence
  Probe
ttaaagattaagagaaccaacacct

SEQ ID NO: 35378 - DNA, 27 bp, Artificial Sequence
  Probe
ttaaagattaagagaaccaacacctct

SEQ ID NO: 35379 - DNA, 36 bp, Artificial Sequence; identical to SEQ ID NO: 24564
  Probe

SEQ ID NO: 35380 - DNA, 38 bp, Artificial Sequence
  Probe
ttaaagattaagagaaccaacacctctttacagtgaaa

SEQ ID NO: 35381 - DNA, 26 bp, Artificial Sequence
  Probe
ttaaaggataacagctatccattggt

SEQ ID NO: 35382 - DNA, 28 bp, Artificial Sequence
  Probe
ttaaaggataacagctatccattggtct

SEQ ID NO: 35383 - DNA, 29 bp, Artificial Sequence
  Probe
ttaaaggataacagctatccattggtctt

SEQ ID NO: 35384 - DNA, 30 bp, Artificial Sequence
  Probe
ttaaaggataacagctatccattggtctta

SEQ ID NO: 35385 - DNA, 31 bp, Artificial Sequence
  Probe
ttaaaggataacagctatccattggtcttag

SEQ ID NO: 35386 - DNA, 34 bp, Artificial Sequence
  Probe
ttaaaggataacagctatccattggtcttaggcc

SEQ ID NO: 35387 - DNA, 36 bp, Artificial Sequence
  Probe
ttaaaggataacagctatccattggtcttaggcccc

SEQ ID NO: 35388 - DNA, 18 bp, Artificial Sequence
  Probe
ttaaagtggctgatttgc

SEQ ID NO: 35389 - DNA, 20 bp, Artificial Sequence
  Probe
ttaaatacagaccaagagcc

SEQ ID NO: 35390 - DNA, 23 bp, Artificial Sequence
  Probe
ttaaattagaatcttagctttgg

SEQ ID NO: 35391 - DNA, 33 bp, Artificial Sequence
  Probe
ttaaattagaatcttagctttgggtgctaatgg

SEQ ID NO: 35392 - DNA, 16 bp, Artificial Sequence
  Probe
ttaacacaaagcaccc

SEQ ID NO: 35393 - DNA, 17 bp, Artificial Sequence
  Probe
ttaacacaaagcaccca

SEQ ID NO: 35394 - DNA, 36 bp, Artificial Sequence
  Probe
ttaacacaaagcacccaacttacacttaggagattt

SEQ ID NO: 35395 - DNA, 36 bp, Artificial Sequence
  Probe
ttaaccaaaacatcagattgtgaatctgacaacaga

SEQ ID NO: 35396 - DNA, 41 bp, Artificial Sequence; identical to SEQ ID NO: 1787
  Probe

SEQ ID NO: 35397 - DNA, 42 bp, Artificial Sequence
  Probe
ttaaccgaaaggttggtggttcgagcccacccagggacgcct

SEQ ID NO: 35398 - DNA, 42 bp, Artificial Sequence
  Probe
ttaaccgaaaggttggtggttcgagcccacccagggacgcta

SEQ ID NO: 35399 - DNA, 36 bp, Artificial Sequence
  Probe
ttaaccgaaaggttggtggttcgatcccacccaggg

SEQ ID NO: 35400 - DNA, 31 bp, Artificial Sequence
  Probe
ttaaccttttaagttaaagattaagagaacc

SEQ ID NO: 35401 - DNA, 36 bp, Artificial Sequence
  Probe
ttaaccttttaagttaaagattaagagaaccaacac

SEQ ID NO: 35402 - DNA, 20 bp, Artificial Sequence
  Probe
ttaactaagtgtttgtgggt

SEQ ID NO: 35403 - DNA, 21 bp, Artificial Sequence
  Probe
ttaactaagtgtttgtgggtt

SEQ ID NO: 35404 - DNA, 22 bp, Artificial Sequence
  Probe
ttaactaagtgtttgtgggttt

SEQ ID NO: 35405 - DNA, 42 bp, Artificial Sequence; identical to SEQ ID NO: 8319
  Probe

SEQ ID NO: 35406 - DNA, 15 bp, Artificial Sequence
  Probe
ttaacttgaccgctc

SEQ ID NO: 35407 - DNA, 16 bp, Artificial Sequence
  Probe
ttaacttgaccgctct

SEQ ID NO: 35408 - DNA, 17 bp, Artificial Sequence
  Probe
ttaacttgaccgctctg

SEQ ID NO: 35409 - DNA, 18 bp, Artificial Sequence
  Probe
ttaacttgaccgctctga

SEQ ID NO: 35410 - DNA, 19 bp, Artificial Sequence
  Probe
ttaacttgaccgctctgag

SEQ ID NO: 35411 - DNA, 20 bp, Artificial Sequence
  Probe
ttaacttgaccgctctgagc

SEQ ID NO: 35412 - DNA, 27 bp, Artificial Sequence
  Probe
ttaacttgaccgctctgagctaaacct

SEQ ID NO: 35413 - DNA, 33 bp, Artificial Sequence
  Probe
ttaacttgaccgctctgagctaaacctagcccc

SEQ ID NO: 35414 - DNA, 36 bp, Artificial Sequence
  Probe
ttaacttgaccgctctgagctaaacctagccccaaa

SEQ ID NO: 35415 - DNA, 16 bp, Artificial Sequence
  Probe
ttaagagaaccaacac

SEQ ID NO: 35416 - DNA, 17 bp, Artificial Sequence
  Probe
ttaagagaaccaacacc

SEQ ID NO: 35417 - DNA, 18 bp, Artificial Sequence
  Probe
ttaagagaaccaacacct

SEQ ID NO: 35418 - DNA, 30 bp, Artificial Sequence; identical to SEQ ID NO: 12276
  Probe

SEQ ID NO: 35419 - DNA, 16 bp, Artificial Sequence
  Probe
ttaagatggcagagcc

SEQ ID NO: 35420 - DNA, 17 bp, Artificial Sequence
  Probe
ttaagatggcagagccc

SEQ ID NO: 35421 - DNA, 36 bp, Artificial Sequence
  Probe
ttaagatggcagagcccggtaatcgcataaaactta

SEQ ID NO: 35422 - DNA, 41 bp, Artificial Sequence
  Probe
ttaagatggcagagcccggtaatcgcataaaacttaaaact

SEQ ID NO: 35423 - DNA, 15 bp, Artificial Sequence
  Probe
ttaaggcgatggact

SEQ ID NO: 35424 - DNA, 16 bp, Artificial Sequence
  Probe
ttaagtcccattggtc

SEQ ID NO: 35425 - DNA, 23 bp, Artificial Sequence
  Probe
ttaagttaaagattaagagaacc

SEQ ID NO: 35426 - DNA, 28 bp, Artificial Sequence
  Probe
ttaagttaaagattaagagaaccaacac

SEQ ID NO: 35427 - DNA, 29 bp, Artificial Sequence
  Probe
ttaagttaaagattaagagaaccaacacc

SEQ ID NO: 35428 - DNA, 30 bp, Artificial Sequence
  Probe
ttaagttaaagattaagagaaccaacacct

SEQ ID NO: 35429 - DNA, 36 bp, Artificial Sequence
  Probe
ttaagttaaagattaagagaaccaacacctctttac

SEQ ID NO: 35430 - DNA, 15 bp, Artificial Sequence
  Probe
ttaatcccagggtcg

SEQ ID NO: 35431 - DNA, 19 bp, Artificial Sequence
  Probe
ttaatcccctggcccaacc

SEQ ID NO: 35432 - DNA, 20 bp, Artificial Sequence
  Probe
ttaatcccctggcccaaccc

SEQ ID NO: 35433 - DNA, 29 bp, Artificial Sequence
  Probe
ttaatcccctggcccaacccgtcatctac

SEQ ID NO: 35434 - DNA, 15 bp, Artificial Sequence
  Probe
ttaatctcagggtcg

SEQ ID NO: 35435 - DNA, 33 bp, Artificial Sequence
  Probe
ttaatctcagggtcgtgggttcgagccccacgt

SEQ ID NO: 35436 - DNA, 42 bp, Artificial Sequence
  Probe
ttaatctcagggtcgtgggttcgagccccacgttgggcggca

SEQ ID NO: 35437 - DNA, 36 bp, Artificial Sequence
  Probe
ttaatctgagggtccagggttcaagtccctgttcgg

SEQ ID NO: 35438 - DNA, 41 bp, Artificial Sequence
  Probe
ttaatctgagggtccagggttcaagtccctgttcgggcggc

SEQ ID NO: 35439 - DNA, 42 bp, Artificial Sequence
  Probe
ttaatctgagggtccagggttcaagtccctgttcgggcggca

SEQ ID NO: 35440 - DNA, 41 bp, Artificial Sequence
  Probe
ttaatctgagggtccagggttcaagtccctgttcgggcgtc

SEQ ID NO: 35441 - DNA, 18 bp, Artificial Sequence
  Probe
ttaattttaataatcaac

SEQ ID NO: 35442 - DNA, 19 bp, Artificial Sequence
  Probe
ttacacgcagaaggtcctg

SEQ ID NO: 35443 - DNA, 21 bp, Artificial Sequence
  Probe
ttacacttaggagatttcaac

SEQ ID NO: 35444 - DNA, 22 bp, Artificial Sequence
  Probe
ttacacttaggagatttcaact

SEQ ID NO: 35445 - DNA, 23 bp, Artificial Sequence
  Probe
ttacacttaggagatttcaactt

SEQ ID NO: 35446 - DNA, 27 bp, Artificial Sequence
  Probe
ttacacttaggagatttcaacttaact

SEQ ID NO: 35447 - DNA, 32 bp, Artificial Sequence
  Probe
ttacacttaggagatttcaacttaacttgacc

SEQ ID NO: 35448 - DNA, 35 bp, Artificial Sequence; identical to SEQ ID NO: 8334
  Probe

SEQ ID NO: 35449 - DNA, 36 bp, Artificial Sequence
  Probe
ttacacttaggagatttcaacttaacttgaccgctc

SEQ ID NO: 35450 - DNA, 37 bp, Artificial Sequence; identical to SEQ ID NO: 8335
  Probe

SEQ ID NO: 35451 - DNA, 41 bp, Artificial Sequence; identical to SEQ ID NO: 8338
  Probe

SEQ ID NO: 35452 - DNA, 42 bp, Artificial Sequence; identical to SEQ ID NO: 8339
  Probe

SEQ ID NO: 35453 - DNA, 15 bp, Artificial Sequence
  Probe
ttacagtcagaggtt

SEQ ID NO: 35454 - DNA, 16 bp, Artificial Sequence
  Probe
ttacagtcagaggttc

SEQ ID NO: 35455 - DNA, 17 bp, Artificial Sequence
  Probe
ttacagtcagaggttca

SEQ ID NO: 35456 - DNA, 22 bp, Artificial Sequence
  Probe
ttacagtcagaggttcaattcc

SEQ ID NO: 35457 - DNA, 23 bp, Artificial Sequence
  Probe
ttacagtcagaggttcaattcct

SEQ ID NO: 35458 - DNA, 27 bp, Artificial Sequence
  Probe
ttacagtcagaggttcaattcctcttc

SEQ ID NO: 35459 - DNA, 19 bp, Artificial Sequence
  Probe
ttacgaccccttatttacc

SEQ ID NO: 35460 - DNA, 20 bp, Artificial Sequence
  Probe
ttacgaccccttatttaccg

SEQ ID NO: 35461 - DNA, 36 bp, Artificial Sequence; identical to SEQ ID NO: 24605
  Probe

SEQ ID NO: 35462 - DNA, 18 bp, Artificial Sequence
  Probe
ttagaatcttagctttgg

SEQ ID NO: 35463 - DNA, 23 bp, Artificial Sequence
  Probe
ttagaatcttagctttgggtgct

SEQ ID NO: 35464 - DNA, 36 bp, Artificial Sequence
  Probe
ttagaatcttagctttgggtgctaatggtggagtta

SEQ ID NO: 35465 - DNA, 50 bp, Artificial Sequence; identical to SEQ ID NO: 1793
  Probe

SEQ ID NO: 35466 - DNA, 15 bp, Artificial Sequence
  Probe
ttagacgggctcaca

SEQ ID NO: 35467 - DNA, 16 bp, Artificial Sequence
  Probe
ttagacgggctcacat

SEQ ID NO: 35468 - DNA, 17 bp, Artificial Sequence
  Probe
ttagacgggctcacatc

SEQ ID NO: 35469 - DNA, 18 bp, Artificial Sequence
  Probe
ttagacgggctcacatca

SEQ ID NO: 35470 - DNA, 19 bp, Artificial Sequence
  Probe
ttagacgggctcacatcac

SEQ ID NO: 35471 - DNA, 20 bp, Artificial Sequence
  Probe
ttagacgggctcacatcacc

SEQ ID NO: 35472 - DNA, 21 bp, Artificial Sequence
  Probe
ttagacgggctcacatcaccc

SEQ ID NO: 35473 - DNA, 25 bp, Artificial Sequence
  Probe
ttagacgggctcacatcaccccata

SEQ ID NO: 35474 - DNA, 27 bp, Artificial Sequence
  Probe
ttagacgggctcacatcaccccataaa

SEQ ID NO: 35475 - DNA, 28 bp, Artificial Sequence
  Probe
ttagacgggctcacatcaccccataaac

SEQ ID NO: 35476 - DNA, 29 bp, Artificial Sequence
  Probe
ttagacgggctcacatcaccccataaaca

SEQ ID NO: 35477 - DNA, 30 bp, Artificial Sequence; identical to SEQ ID NO: 8357
  Probe

SEQ ID NO: 35478 - DNA, 31 bp, Artificial Sequence; identical to SEQ ID NO: 8358
  Probe

SEQ ID NO: 35479 - DNA, 15 bp, Artificial Sequence
  Probe
ttagcactctggact

SEQ ID NO: 35480 - DNA, 16 bp, Artificial Sequence
  Probe
ttagcactctggactc

SEQ ID NO: 35481 - DNA, 19 bp, Artificial Sequence
  Probe
ttagcactctggactctga

SEQ ID NO: 35482 - DNA, 20 bp, Artificial Sequence
  Probe
ttagcactctggactctgaa

SEQ ID NO: 35483 - DNA, 21 bp, Artificial Sequence
  Probe
ttagcactctggactctgaat

SEQ ID NO: 35484 - DNA, 23 bp, Artificial Sequence
  Probe
ttagcactctggactctgaatcc

SEQ ID NO: 35485 - DNA, 24 bp, Artificial Sequence
  Probe
ttagcactctggactctgaatcca

SEQ ID NO: 35486 - DNA, 31 bp, Artificial Sequence
  Probe
ttagcactctggactctgaatccagcgatcc

SEQ ID NO: 35487 - DNA, 32 bp, Artificial Sequence
  Probe
ttagcactctggactctgaatccagcgatccg

SEQ ID NO: 35488 - DNA, 33 bp, Artificial Sequence
  Probe
ttagcactctggactctgaatccagcgatccga

SEQ ID NO: 35489 - DNA, 37 bp, Artificial Sequence
  Probe
ttagcactctggactctgaatccagcgatccgagttc

SEQ ID NO: 35490 - DNA, 38 bp, Artificial Sequence
  Probe
ttagcactctggactctgaatccagcgatccgagttca

SEQ ID NO: 35491 - DNA, 22 bp, Artificial Sequence
  Probe
ttagcactctggactttgaatc

SEQ ID NO: 35492 - DNA, 23 bp, Artificial Sequence
  Probe
ttagcactctggactttgaatcc

SEQ ID NO: 35493 - DNA, 34 bp, Artificial Sequence
  Probe
ttagcactctggactttgaatccagcaatccgag

SEQ ID NO: 35494 - DNA, 35 bp, Artificial Sequence
  Probe
ttagcactctggactttgaatccagcaatccgagt

SEQ ID NO: 35495 - DNA, 36 bp, Artificial Sequence
  Probe
ttagcactctggactttgaatccagcaatccgagtt

SEQ ID NO: 35496 - DNA, 34 bp, Artificial Sequence
  Probe
ttagcactctggactttgaatccagcgatccgag

SEQ ID NO: 35497 - DNA, 35 bp, Artificial Sequence
  Probe
ttagcactctggactttgaatccagcgatccgagt

SEQ ID NO: 35498 - DNA, 37 bp, Artificial Sequence
  Probe
ttagcactctggactttgaatccagcgatccgagttc

SEQ ID NO: 35499 - DNA, 38 bp, Artificial Sequence
  Probe
ttagcactctggactttgaatccagcgatccgagttca

SEQ ID NO: 35500 - DNA, 23 bp, Artificial Sequence
  Probe
ttagcatgcacgaggccccgggt

SEQ ID NO: 35501 - DNA, 23 bp, Artificial Sequence
  Probe
ttagcatgcgagaggtagcggga

SEQ ID NO: 35502 - DNA, 37 bp, Artificial Sequence; identical to SEQ ID NO: 8364
  Probe

SEQ ID NO: 35503 - DNA, 43 bp, Artificial Sequence
  Probe
ttagcattaaccttttaagttaaagattaagagaaccaacacc

SEQ ID NO: 35504 - DNA, 27 bp, Artificial Sequence
  Probe
ttagctttgggtgctaatggtggagtt

SEQ ID NO: 35505 - DNA, 31 bp, Artificial Sequence
  Probe
ttagctttgggtgctaatggtggagttaaag

SEQ ID NO: 35506 - DNA, 32 bp, Artificial Sequence
  Probe
ttagctttgggtgctaatggtggagttaaaga

SEQ ID NO: 35507 - DNA, 33 bp, Artificial Sequence
  Probe
ttagctttgggtgctaatggtggagttaaagac

SEQ ID NO: 35508 - DNA, 34 bp, Artificial Sequence
  Probe
ttagctttgggtgctaatggtggagttaaagact

SEQ ID NO: 35509 - DNA, 36 bp, Artificial Sequence
  Probe
ttagctttgggtgctaatggtggagttaaagacttt

SEQ ID NO: 35510 - DNA, 15 bp, Artificial Sequence
  Probe
ttaggagatttcaac

SEQ ID NO: 35511 - DNA, 16 bp, Artificial Sequence
  Probe
ttaggagatttcaact

SEQ ID NO: 35512 - DNA, 21 bp, Artificial Sequence
  Probe
ttaggagatttcaacttaact

SEQ ID NO: 35513 - DNA, 26 bp, Artificial Sequence
  Probe
ttaggagatttcaacttaacttgacc

SEQ ID NO: 35514 - DNA, 27 bp, Artificial Sequence
  Probe
ttaggagatttcaacttaacttgaccg

SEQ ID NO: 35515 - DNA, 29 bp, Artificial Sequence
  Probe
ttaggagatttcaacttaacttgaccgct

SEQ ID NO: 35516 - DNA, 30 bp, Artificial Sequence; identical to SEQ ID NO: 8367
  Probe

SEQ ID NO: 35517 - DNA, 31 bp, Artificial Sequence; identical to SEQ ID NO: 8368
  Probe

SEQ ID NO: 35518 - DNA, 35 bp, Artificial Sequence; identical to SEQ ID NO: 8372
  Probe

SEQ ID NO: 35519 - DNA, 36 bp, Artificial Sequence; identical to SEQ ID NO: 8373
  Probe

SEQ ID NO: 35520 - DNA, 19 bp, Artificial Sequence
  Probe
ttaggatgcgagaggtccc

SEQ ID NO: 35521 - DNA, 22 bp, Artificial Sequence
  Probe
ttaggatgcgagaggtcccggg

SEQ ID NO: 35522 - DNA, 23 bp, Artificial Sequence
  Probe
ttaggatgcgagaggtcccgggt

SEQ ID NO: 35523 - DNA, 24 bp, Artificial Sequence
  Probe
ttaggatgcgagaggtcccgggtt

SEQ ID NO: 35524 - DNA, 31 bp, Artificial Sequence
  Probe
ttaggatggggtgtgataggtggcacggaga

SEQ ID NO: 35525 - DNA, 36 bp, Artificial Sequence
  Probe
ttaggatggggtgtgataggtggcacggagaatttt

SEQ ID NO: 35526 - DNA, 15 bp, Artificial Sequence
  Probe
ttaggattcggcgct

SEQ ID NO: 35527 - DNA, 17 bp, Artificial Sequence
  Probe
ttaggattcggcgctct

SEQ ID NO: 35528 - DNA, 21 bp, Artificial Sequence
  Probe
ttaggattcggcgctctcacc

SEQ ID NO: 35529 - DNA, 36 bp, Artificial Sequence
  Probe
ttaggccccaaaaattttggtgcaactccaaataaa

SEQ ID NO: 35530 - DNA, 17 bp, Artificial Sequence
  Probe
ttaggcctctttttacc

SEQ ID NO: 35531 - DNA, 20 bp, Artificial Sequence
  Probe
ttaggcctctttttaccagc

SEQ ID NO: 35532 - DNA, 18 bp, Artificial Sequence
  Probe
ttagggtgcgagaggtcc

SEQ ID NO: 35533 - DNA, 19 bp, Artificial Sequence
  Probe
ttagggtgcgagaggtccc

SEQ ID NO: 35534 - DNA, 21 bp, Artificial Sequence
  Probe
ttagggtgcgagaggtcccgg

SEQ ID NO: 35535 - DNA, 22 bp, Artificial Sequence
  Probe
ttagggtgcgagaggtcccggg

SEQ ID NO: 35536 - DNA, 23 bp, Artificial Sequence
  Probe
ttagggtgcgagaggtcccgggt

SEQ ID NO: 35537 - DNA, 24 bp, Artificial Sequence
  Probe
ttagggtgcgagaggtcccgggtt

SEQ ID NO: 35538 - DNA, 18 bp, Artificial Sequence
  Probe
ttagggtgcttagctgtt

SEQ ID NO: 35539 - DNA, 22 bp, Artificial Sequence
  Probe
ttagggtgcttagctgttaact

SEQ ID NO: 35540 - DNA, 34 bp, Artificial Sequence
  Probe
ttagtactctgcgttgtggccgcagcaacctcgg

SEQ ID NO: 35541 - DNA, 35 bp, Artificial Sequence
  Probe
ttagtactctgcgttgtggccgcagcaacctcggt

SEQ ID NO: 35542 - DNA, 36 bp, Artificial Sequence
  Probe
ttagtactctgcgttgtggccgcagcaacctcggtt

SEQ ID NO: 35543 - DNA, 24 bp, Artificial Sequence
  Probe
ttagtctaggctgtcagctcttcc

SEQ ID NO: 35544 - DNA, 18 bp, Artificial Sequence
  Probe
ttatacccttcccgtact

SEQ ID NO: 35545 - DNA, 19 bp, Artificial Sequence
  Probe
ttatacccttcccgtacta

SEQ ID NO: 35546 - DNA, 21 bp, Artificial Sequence
  Probe
ttatcacgttcgcctaacacg

SEQ ID NO: 35547 - DNA, 21 bp, Artificial Sequence
  Probe
ttatcacgttcgcctcacacg

SEQ ID NO: 35548 - DNA, 18 bp, Artificial Sequence
  Probe
ttatgtagcttacctcct

SEQ ID NO: 35549 - DNA, 24 bp, Artificial Sequence
  Probe
ttattcaattgaaacagcgtgatt

SEQ ID NO: 35550 - DNA, 25 bp, Artificial Sequence
  Probe
ttattcaattgaaacagcgtgattt

SEQ ID NO: 35551 - DNA, 26 bp, Artificial Sequence
  Probe
ttattcaattgaaacagcgtgatttt

SEQ ID NO: 35552 - DNA, 24 bp, Artificial Sequence
  Probe
ttatttctaggactatgagaatcg

SEQ ID NO: 35553 - DNA, 27 bp, Artificial Sequence
  Probe
ttatttctaggactatgagaatcgaac

SEQ ID NO: 35554 - DNA, 28 bp, Artificial Sequence
  Probe
ttatttctaggactatgagaatcgaacc

SEQ ID NO: 35555 - DNA, 29 bp, Artificial Sequence
  Probe
ttatttctaggactatgagaatcgaaccc

SEQ ID NO: 35556 - DNA, 30 bp, Artificial Sequence
  Probe
ttatttctaggactatgagaatcgaaccca

SEQ ID NO: 35557 - DNA, 32 bp, Artificial Sequence
  Probe
ttatttctaggactatgagaatcgaacccatc

SEQ ID NO: 35558 - DNA, 33 bp, Artificial Sequence
  Probe
ttatttctaggactatgagaatcgaacccatcc

SEQ ID NO: 35559 - DNA, 36 bp, Artificial Sequence
  Probe
ttatttctaggactatgagaatcgaacccatccctg

SEQ ID NO: 35560 - DNA, 17 bp, Artificial Sequence
  Probe
ttcaaacctgccggggc

SEQ ID NO: 35561 - DNA, 18 bp, Artificial Sequence
  Probe
ttcaaacctgccggggct

SEQ ID NO: 35562 - DNA, 21 bp, Artificial Sequence
  Probe
ttcaaacctgccggggcttct

SEQ ID NO: 35563 - DNA, 36 bp, Artificial Sequence
  Probe
ttcaaagccctcagtaagttgcaatacttaatttct

SEQ ID NO: 35564 - DNA, 17 bp, Artificial Sequence
  Probe
ttcaaaggtgaacgttt

SEQ ID NO: 35565 - DNA, 18 bp, Artificial Sequence
  Probe
ttcaaaggtgaacgtttt

SEQ ID NO: 35566 - DNA, 36 bp, Artificial Sequence
  Probe
ttcaaaggttccgggttcgagtcccggcggagtcgt

SEQ ID NO: 35567 - DNA, 38 bp, Artificial Sequence; identical to SEQ ID NO: 24636
  Probe

SEQ ID NO: 35568 - DNA, 36 bp, Artificial Sequence
  Probe
ttcaaaggttgtgggttcgaatcccaccagagtcga

SEQ ID NO: 35569 - DNA, 38 bp, Artificial Sequence
  Probe
ttcaaaggttgtgggttcgagtcccaccagagtcgctt

SEQ ID NO: 35570 - DNA, 19 bp, Artificial Sequence
  Probe
ttcaaatcccggacgagcc

SEQ ID NO: 35571 - DNA, 20 bp, Artificial Sequence
  Probe
ttcaaatcccggacgagccc

SEQ ID NO: 35572 - DNA, 23 bp, Artificial Sequence
  Probe
ttcaaatcccggacgagccctca

SEQ ID NO: 35573 - DNA, 20 bp, Artificial Sequence
  Probe
ttcaacttaacttgaccgct

SEQ ID NO: 35574 - DNA, 22 bp, Artificial Sequence
  Probe
ttcaacttaacttgaccgctct

SEQ ID NO: 35575 - DNA, 24 bp, Artificial Sequence
  Probe
ttcaacttaacttgaccgctctga

SEQ ID NO: 35576 - DNA, 25 bp, Artificial Sequence
  Probe
ttcaacttaacttgaccgctctgag

SEQ ID NO: 35577 - DNA, 26 bp, Artificial Sequence
  Probe
ttcaacttaacttgaccgctctgagc

SEQ ID NO: 35578 - DNA, 32 bp, Artificial Sequence
  Probe
ttcaacttaacttgaccgctctgagctaaacc

SEQ ID NO: 35579 - DNA, 33 bp, Artificial Sequence
  Probe
ttcaacttaacttgaccgctctgagctaaacct

SEQ ID NO: 35580 - DNA, 36 bp, Artificial Sequence
  Probe
ttcaacttaacttgaccgctctgagctaaacctagc

SEQ ID NO: 35581 - DNA, 36 bp, Artificial Sequence
  Probe
ttcagatgcgttggtggtatagtggtgagcatagct

SEQ ID NO: 35582 - DNA, 19 bp, Artificial Sequence
  Probe
ttcagctatagggtggaga

SEQ ID NO: 35583 - DNA, 15 bp, Artificial Sequence
  Probe
ttcaggtcgcagtct

SEQ ID NO: 35584 - DNA, 16 bp, Artificial Sequence
  Probe
ttcaggtcgcagtctc

SEQ ID NO: 35585 - DNA, 17 bp, Artificial Sequence
  Probe
ttcaggtcgcagtctcc

SEQ ID NO: 35586 - DNA, 20 bp, Artificial Sequence
  Probe
ttcagtggtagaattctcgc

SEQ ID NO: 35587 - DNA, 21 bp, Artificial Sequence
  Probe
ttcagtggtagaattctcgcc

SEQ ID NO: 35588 - DNA, 22 bp, Artificial Sequence
  Probe
ttcagtggtagaattctcgcct

SEQ ID NO: 35589 - DNA, 24 bp, Artificial Sequence
  Probe
ttcagtggtagaattctcgcctgc

SEQ ID NO: 35590 - DNA, 25 bp, Artificial Sequence
  Probe
ttcagtggtagaattctcgcctgcc

SEQ ID NO: 35591 - DNA, 26 bp, Artificial Sequence
  Probe
ttcagtggtagaattctcgcctgcca

SEQ ID NO: 35592 - DNA, 36 bp, Artificial Sequence
  Probe
ttcagtggtagaattctcgcctgccacgcgggaggc

SEQ ID NO: 35593 - DNA, 31 bp, Artificial Sequence; identical to SEQ ID NO: 8393
  Probe

SEQ ID NO: 35594 - DNA, 32 bp, Artificial Sequence
  Probe
ttcagttgatgcagagtggggttttgcagtcc

SEQ ID NO: 35595 - DNA, 33 bp, Artificial Sequence; identical to SEQ ID NO: 8394
  Probe

SEQ ID NO: 35596 - DNA, 36 bp, Artificial Sequence; identical to SEQ ID NO: 8396
  Probe

SEQ ID NO: 35597 - DNA, 37 bp, Artificial Sequence; identical to SEQ ID NO: 8397
  Probe

SEQ ID NO: 35598 - DNA, 38 bp, Artificial Sequence; identical to SEQ ID NO: 8398
  Probe

SEQ ID NO: 35599 - DNA, 32 bp, Artificial Sequence
  Probe
ttcataactttgtcaaagttaaattataggct

SEQ ID NO: 35600 - DNA, 27 bp, Artificial Sequence
  Probe
ttcatatcattggtcgtggttgtagtc

SEQ ID NO: 35601 - DNA, 28 bp, Artificial Sequence
  Probe
ttcatatcattggtcgtggttgtagtcc

SEQ ID NO: 35602 - DNA, 31 bp, Artificial Sequence
  Probe
ttcatatcattggtcgtggttgtagtccgtg

SEQ ID NO: 35603 - DNA, 33 bp, Artificial Sequence
  Probe
ttcatatcattggtcgtggttgtagtccgtgcg

SEQ ID NO: 35604 - DNA, 34 bp, Artificial Sequence
  Probe
ttcatatcattggtcgtggttgtagtccgtgcga

SEQ ID NO: 35605 - DNA, 35 bp, Artificial Sequence
  Probe
ttcatatcattggtcgtggttgtagtccgtgcgag

SEQ ID NO: 35606 - DNA, 37 bp, Artificial Sequence
  Probe
ttcatatcattggtcgtggttgtagtccgtgcgagaa

SEQ ID NO: 35607 - DNA, 38 bp, Artificial Sequence
  Probe
ttcatatcattggtcgtggttgtagtccgtgcgagaat

SEQ ID NO: 35608 - DNA, 39 bp, Artificial Sequence; identical to SEQ ID NO: 14465
  Probe

SEQ ID NO: 35609 - DNA, 41 bp, Artificial Sequence; identical to SEQ ID NO: 8401
  Probe

SEQ ID NO: 35610 - DNA, 16 bp, Artificial Sequence
  Probe
ttcatattgaattgca

SEQ ID NO: 35611 - DNA, 36 bp, Artificial Sequence
  Probe
ttcatattgaattgcaaattcgaagaagcagcttca

SEQ ID NO: 35612 - DNA, 16 bp, Artificial Sequence
  Probe
ttcatttctctccttt

SEQ ID NO: 35613 - DNA, 17 bp, Artificial Sequence
  Probe
ttccaagcagttgaccc

SEQ ID NO: 35614 - DNA, 18 bp, Artificial Sequence
  Probe
ttccaagcagttgacccg

SEQ ID NO: 35615 - DNA, 21 bp, Artificial Sequence
  Probe
ttccaagcagttgacccgggt

SEQ ID NO: 35616 - DNA, 36 bp, Artificial Sequence
  Probe
ttccaattaactagttttgacaacattcaaaaaaga

SEQ ID NO: 35617 - DNA, 16 bp, Artificial Sequence
  Probe
ttccagctcgaaggaa

SEQ ID NO: 35618 - DNA, 29 bp, Artificial Sequence
  Probe
ttccatagtgtagtggttatcacgtctgc

SEQ ID NO: 35619 - DNA, 30 bp, Artificial Sequence; identical to SEQ ID NO: 24665
  Probe

SEQ ID NO: 35620 - DNA, 33 bp, Artificial Sequence; identical to SEQ ID NO: 24668
  Probe

SEQ ID NO: 35621 - DNA, 34 bp, Artificial Sequence; identical to SEQ ID NO: 24669
  Probe

SEQ ID NO: 35622 - DNA, 31 bp, Artificial Sequence
  Probe
ttccatggtgtaatggttagcactctggact

SEQ ID NO: 35623 - DNA, 33 bp, Artificial Sequence
  Probe
ttccatggtgtaatggttagcactctggactct

SEQ ID NO: 35624 - DNA, 36 bp, Artificial Sequence
  Probe
ttccatggtgtaatggttagcactctggactctgaa

SEQ ID NO: 35625 - DNA, 50 bp, Artificial Sequence
  Probe
ttccatggtgtaatggttagcactctggactctgaatccagcgatccgag

SEQ ID NO: 35626 - DNA, 16 bp, Artificial Sequence
  Probe
ttcccattcttgcgac

SEQ ID NO: 35627 - DNA, 18 bp, Artificial Sequence
  Probe
ttccccgacggggaggca

SEQ ID NO: 35628 - DNA, 16 bp, Artificial Sequence
  Probe
ttcccggccaacgcaa

SEQ ID NO: 35629 - DNA, 16 bp, Artificial Sequence
  Probe
ttcccggccaacgcag

SEQ ID NO: 35630 - DNA, 17 bp, Artificial Sequence
  Probe
ttcccggccaacgcagc

SEQ ID NO: 35631 - DNA, 18 bp, Artificial Sequence
  Probe
ttcccggccaacgcagcg

SEQ ID NO: 35632 - DNA, 16 bp, Artificial Sequence
  Probe
ttcccggccaacgcat

SEQ ID NO: 35633 - DNA, 15 bp, Artificial Sequence
  Probe
ttcccggccaatgca

SEQ ID NO: 35634 - DNA, 24 bp, Artificial Sequence
  Probe
ttcccggccaatgcaacgatgacg

SEQ ID NO: 35635 - DNA, 26 bp, Artificial Sequence
  Probe
ttcccggccaatgcaacgatgacgtt

SEQ ID NO: 35636 - DNA, 27 bp, Artificial Sequence
  Probe
ttcccggccaatgcaacgatgacgttt

SEQ ID NO: 35637 - DNA, 28 bp, Artificial Sequence
  Probe
ttcccggccaatgcaacgatgacgtttt

SEQ ID NO: 35638 - DNA, 29 bp, Artificial Sequence
  Probe
ttcccggccaatgcaacgatgacgtttta

SEQ ID NO: 35639 - DNA, 16 bp, Artificial Sequence
  Probe
ttcccggccaatgcac

SEQ ID NO: 35640 - DNA, 15 bp, Artificial Sequence
  Probe
ttcccgggcggcgca

SEQ ID NO: 35641 - DNA, 16 bp, Artificial Sequence
  Probe
ttcccgggcggcgcac

SEQ ID NO: 35642 - DNA, 17 bp, Artificial Sequence
  Probe
ttcccgggcggcgcact

SEQ ID NO: 35643 - DNA, 16 bp, Artificial Sequence
  Probe
ttcccggtcagggaac

SEQ ID NO: 35644 - DNA, 17 bp, Artificial Sequence
  Probe
ttcccggtcagggaacc

SEQ ID NO: 35645 - DNA, 18 bp, Artificial Sequence
  Probe
ttcccggtcagggaacca

SEQ ID NO: 35646 - DNA, 34 bp, Artificial Sequence; identical to SEQ ID NO: 24676
  Probe

SEQ ID NO: 35647 - DNA, 35 bp, Artificial Sequence
  Probe
ttccctggtggtctagtggttaggattcggcgctc

SEQ ID NO: 35648 - DNA, 36 bp, Artificial Sequence
  Probe
ttccctggtggtctagtggttaggattcggcgctct

SEQ ID NO: 35649 - DNA, 37 bp, Artificial Sequence
  Probe
ttccctggtggtctagtggttaggattcggcgctctc

SEQ ID NO: 35650 - DNA, 19 bp, Artificial Sequence
  Probe
ttccggatcagaagattga

SEQ ID NO: 35651 - DNA, 23 bp, Artificial Sequence
  Probe
ttccggatcagaagattgagggt

SEQ ID NO: 35652 - DNA, 15 bp, Artificial Sequence
  Probe
ttccggctcgaagga

SEQ ID NO: 35653 - DNA, 17 bp, Artificial Sequence
  Probe
ttccggctcgaaggaag

SEQ ID NO: 35654 - DNA, 17 bp, Artificial Sequence
  Probe
ttccggctcgaaggact

SEQ ID NO: 35655 - DNA, 18 bp, Artificial Sequence
  Probe
ttccggctcgaaggactt

SEQ ID NO: 35656 - DNA, 22 bp, Artificial Sequence
  Probe
ttccggctcgaaggacttcgtc

SEQ ID NO: 35657 - DNA, 17 bp, Artificial Sequence
  Probe
ttccggctcgaaggaga

SEQ ID NO: 35658 - DNA, 17 bp, Artificial Sequence
  Probe
ttccggctcgaaggagc

SEQ ID NO: 35659 - DNA, 18 bp, Artificial Sequence
  Probe
ttccggctcgaaggagct

SEQ ID NO: 35660 - DNA, 31 bp, Artificial Sequence
  Probe
ttccgtagtggagtggttatcacgttcgcct

SEQ ID NO: 35661 - DNA, 30 bp, Artificial Sequence; identical to SEQ ID NO: 24681
  Probe

SEQ ID NO: 35662 - DNA, 31 bp, Artificial Sequence; identical to SEQ ID NO: 14469
  Probe

SEQ ID NO: 35663 - DNA, 32 bp, Artificial Sequence; identical to SEQ ID NO: 8419
  Probe

SEQ ID NO: 35664 - DNA, 33 bp, Artificial Sequence; identical to SEQ ID NO: 8420
  Probe

SEQ ID NO: 35665 - DNA, 21 bp, Artificial Sequence
  Probe
ttccgtagtgtagtggtcatc

SEQ ID NO: 35666 - DNA, 32 bp, Artificial Sequence; identical to SEQ ID NO: 24688
  Probe

SEQ ID NO: 35667 - DNA, 33 bp, Artificial Sequence; identical to SEQ ID NO: 8422
  Probe

SEQ ID NO: 35668 - DNA, 34 bp, Artificial Sequence; identical to SEQ ID NO: 24690
  Probe

SEQ ID NO: 35669 - DNA, 21 bp, Artificial Sequence
  Probe
ttccgtagtgtagtggttatc

SEQ ID NO: 35670 - DNA, 30 bp, Artificial Sequence; identical to SEQ ID NO: 8425
  Probe

SEQ ID NO: 35671 - DNA, 31 bp, Artificial Sequence; identical to SEQ ID NO: 8426
  Probe

SEQ ID NO: 35672 - DNA, 33 bp, Artificial Sequence
  Probe
ttccgtagtgtagtggttatcacgttcgcctaa

SEQ ID NO: 35673 - DNA, 32 bp, Artificial Sequence; identical to SEQ ID NO: 8427
  Probe

SEQ ID NO: 35674 - DNA, 33 bp, Artificial Sequence; identical to SEQ ID NO: 8428
  Probe

SEQ ID NO: 35675 - DNA, 34 bp, Artificial Sequence; identical to SEQ ID NO: 8429
  Probe

SEQ ID NO: 35676 - DNA, 35 bp, Artificial Sequence; identical to SEQ ID NO: 8430
  Probe

SEQ ID NO: 35677 - DNA, 36 bp, Artificial Sequence
  Probe
ttccgtagtgtagtggttatcacgttcgcctcacac

SEQ ID NO: 35678 - DNA, 31 bp, Artificial Sequence
  Probe
ttccgtagtgtagtggttatcacgtttgcct

SEQ ID NO: 35679 - DNA, 15 bp, Artificial Sequence
  Probe
ttccgtgggtttgtt

SEQ ID NO: 35680 - DNA, 16 bp, Artificial Sequence
  Probe
ttccgtgggtttgttt

SEQ ID NO: 35681 - DNA, 17 bp, Artificial Sequence
  Probe
ttccgtgggtttgtttt

SEQ ID NO: 35682 - DNA, 18 bp, Artificial Sequence
  Probe
ttccgtgggtttgttttt

SEQ ID NO: 35683 - DNA, 19 bp, Artificial Sequence
  Probe
ttccgtgggtttgtttttt

SEQ ID NO: 35684 - DNA, 20 bp, Artificial Sequence
  Probe
ttccgtgggtttgttttttt

SEQ ID NO: 35685 - DNA, 30 bp, Artificial Sequence; identical to SEQ ID NO: 24706
  Probe

SEQ ID NO: 35686 - DNA, 31 bp, Artificial Sequence; identical to SEQ ID NO: 24707
  Probe

SEQ ID NO: 35687 - DNA, 29 bp, Artificial Sequence
  Probe
ttccttgtccggtttatgtctcttggttt

SEQ ID NO: 35688 - DNA, 32 bp, Artificial Sequence; identical to SEQ ID NO: 8435
  Probe

SEQ ID NO: 35689 - DNA, 33 bp, Artificial Sequence; identical to SEQ ID NO: 8436
  Probe

SEQ ID NO: 35690 - DNA, 33 bp, Artificial Sequence
  Probe
ttcgactcattaaattatgataatcatatttac

SEQ ID NO: 35691 - DNA, 36 bp, Artificial Sequence
  Probe
ttcgactcattaaattatgataatcatatttaccaa

SEQ ID NO: 35692 - DNA, 16 bp, Artificial Sequence
  Probe
ttcgactcccggtgtg

SEQ ID NO: 35693 - DNA, 21 bp, Artificial Sequence
  Probe
ttcgactttagtggaaacttt

SEQ ID NO: 35694 - DNA, 30 bp, Artificial Sequence
  Probe
ttcgactttagtggaaactttgaggtttac

SEQ ID NO: 35695 - DNA, 19 bp, Artificial Sequence
  Probe
ttcgagtctcggtggaacc

SEQ ID NO: 35696 - DNA, 20 bp, Artificial Sequence
  Probe
ttcgagtctcggtggaacct

SEQ ID NO: 35697 - DNA, 31 bp, Artificial Sequence
  Probe
ttcgatagctcagctggtagagcggaggact

SEQ ID NO: 35698 - DNA, 29 bp, Artificial Sequence
  Probe
ttcgatccccggcatctccattgtagttt

SEQ ID NO: 35699 - DNA, 30 bp, Artificial Sequence
  Probe
ttcgatccccggcatctccattgtagtttt

SEQ ID NO: 35700 - DNA, 16 bp, Artificial Sequence
  Probe
ttcgattccccgacgg

SEQ ID NO: 35701 - DNA, 32 bp, Artificial Sequence
  Probe
ttcgattcccggccaatgcaacgatgacgttt

SEQ ID NO: 35702 - DNA, 23 bp, Artificial Sequence
  Probe
ttcgattcccggccaatgcacga

SEQ ID NO: 35703 - DNA, 23 bp, Artificial Sequence
  Probe
ttcgattcccggccaatgcagca

SEQ ID NO: 35704 - DNA, 17 bp, Artificial Sequence
  Probe
ttcgattcccggtcagg

SEQ ID NO: 35705 - DNA, 22 bp, Artificial Sequence
  Probe
ttcgattccggctcgaaggact

SEQ ID NO: 35706 - DNA, 15 bp, Artificial Sequence
  Probe
ttcggcgctctcacc

SEQ ID NO: 35707 - DNA, 17 bp, Artificial Sequence
  Probe
ttcggcgctctcaccgc

SEQ ID NO: 35708 - DNA, 18 bp, Artificial Sequence
  Probe
ttcggcgctctcaccgcc

SEQ ID NO: 35709 - DNA, 26 bp, Artificial Sequence
  Probe
ttcggcgctctcaccgccgcggcccg

SEQ ID NO: 35710 - DNA, 27 bp, Artificial Sequence
  Probe
ttcggcgctctcaccgccgcggcccgg

SEQ ID NO: 35711 - DNA, 28 bp, Artificial Sequence
  Probe
ttcggcgctctcaccgccgcggcccggg

SEQ ID NO: 35712 - DNA, 31 bp, Artificial Sequence
  Probe
ttcggcgctctcaccgccgcggcccgggttc

SEQ ID NO: 35713 - DNA, 35 bp, Artificial Sequence
  Probe
ttcggcgctctcaccgccgcggcccgggttcgatt

SEQ ID NO: 35714 - DNA, 50 bp, Artificial Sequence
  Probe
ttcggcgctctcaccgccgcggcccgggttcgattcccggtcagggaagc

SEQ ID NO: 35715 - DNA, 26 bp, Artificial Sequence
  Probe
ttcggctgttaaccgaaaggttggtg

SEQ ID NO: 35716 - DNA, 27 bp, Artificial Sequence
  Probe
ttcggctgttaaccgaaaggttggtgg

SEQ ID NO: 35717 - DNA, 28 bp, Artificial Sequence
  Probe
ttcggctgttaaccgaaaggttggtggt

SEQ ID NO: 35718 - DNA, 29 bp, Artificial Sequence
  Probe
ttcggctgttaaccgaaaggttggtggtt

SEQ ID NO: 35719 - DNA, 30 bp, Artificial Sequence
  Probe
ttcggctgttaaccgaaaggttggtggttc

SEQ ID NO: 35720 - DNA, 36 bp, Artificial Sequence
  Probe
ttcggctgttaaccgaaaggttggtggttcgagccc

SEQ ID NO: 35721 - DNA, 20 bp, Artificial Sequence
  Probe
ttcgggcgggagtggtggct

SEQ ID NO: 35722 - DNA, 21 bp, Artificial Sequence
  Probe
ttcgggcgggagtggtggctt

SEQ ID NO: 35723 - DNA, 22 bp, Artificial Sequence
  Probe
ttcgggcgggagtggtggcttt

SEQ ID NO: 35724 - DNA, 23 bp, Artificial Sequence
  Probe
ttcgggcgggagtggtggctttt

SEQ ID NO: 35725 - DNA, 18 bp, Artificial Sequence
  Probe
ttcgggtgcgagaggtcc

SEQ ID NO: 35726 - DNA, 19 bp, Artificial Sequence
  Probe
ttcgggtgcgagaggtccc

SEQ ID NO: 35727 - DNA, 21 bp, Artificial Sequence
  Probe
ttcgggtgcgagaggtcccgg

SEQ ID NO: 35728 - DNA, 22 bp, Artificial Sequence
  Probe
ttcgggtgcgagaggtcccggg

SEQ ID NO: 35729 - DNA, 23 bp, Artificial Sequence
  Probe
ttcgggtgcgagaggtcccgggt

SEQ ID NO: 35730 - DNA, 24 bp, Artificial Sequence
  Probe
ttcgggtgcgagaggtcccgggtt

SEQ ID NO: 35731 - DNA, 24 bp, Artificial Sequence
  Probe
ttctaggactatgagaatcgaacc

SEQ ID NO: 35732 - DNA, 25 bp, Artificial Sequence
  Probe
ttctaggactatgagaatcgaaccc

SEQ ID NO: 35733 - DNA, 35 bp, Artificial Sequence
  Probe
ttctaggactatgagaatcgaacccatccctgaga

SEQ ID NO: 35734 - DNA, 15 bp, Artificial Sequence
  Probe
ttctcgcctgccacg

SEQ ID NO: 35735 - DNA, 16 bp, Artificial Sequence
  Probe
ttctcgcctgccacgc

SEQ ID NO: 35736 - DNA, 19 bp, Artificial Sequence
  Probe
ttctggtctccaatggagg

SEQ ID NO: 35737 - DNA, 36 bp, Artificial Sequence
  Probe
ttctggtctccaatggaggcgtgggttcgaatccca

SEQ ID NO: 35738 - DNA, 16 bp, Artificial Sequence
  Probe
ttctggtctccggatg

SEQ ID NO: 35739 - DNA, 50 bp, Artificial Sequence
  Probe
ttctggtctccggatggaggcgtgggttcgaatcccacttctgacacatt

SEQ ID NO: 35740 - DNA, 32 bp, Artificial Sequence
  Probe
ttctgtagtgtagtggttatcacgttcgcctc

SEQ ID NO: 35741 - DNA, 33 bp, Artificial Sequence; identical to SEQ ID NO: 24743
  Probe

SEQ ID NO: 35742 - DNA, 30 bp, Artificial Sequence
  Probe
ttctgtttaattaggacggcaatgttgtgt

SEQ ID NO: 35743 - DNA, 33 bp, Artificial Sequence; identical to SEQ ID NO: 24744
  Probe

SEQ ID NO: 35744 - DNA, 36 bp, Artificial Sequence; identical to SEQ ID NO: 24745
  Probe

SEQ ID NO: 35745 - DNA, 26 bp, Artificial Sequence
  Probe
ttgaaaacaaaatactcaaatgggcc

SEQ ID NO: 35746 - DNA, 23 bp, Artificial Sequence
  Probe
ttgaaaccagctttggggggttc

SEQ ID NO: 35747 - DNA, 24 bp, Artificial Sequence
  Probe
ttgaaaccagctttggggggttcg

SEQ ID NO: 35748 - DNA, 36 bp, Artificial Sequence
  Probe
ttgaaatacaacgatggtttttcatatcattggtcg

SEQ ID NO: 35749 - DNA, 19 bp, Artificial Sequence
  Probe
ttgaatccagcgatccgag

SEQ ID NO: 35750 - DNA, 20 bp, Artificial Sequence
  Probe
ttgaatccagcgatccgagt

SEQ ID NO: 35751 - DNA, 21 bp, Artificial Sequence
  Probe
ttgaatccagcgatccgagtt

SEQ ID NO: 35752 - DNA, 36 bp, Artificial Sequence
  Probe
ttgaattgcaaattcgaagaagcagcttcaaacctg

SEQ ID NO: 35753 - DNA, 22 bp, Artificial Sequence
  Probe
ttgaccgctctgagctaaacct

SEQ ID NO: 35754 - DNA, 26 bp, Artificial Sequence
  Probe
ttgactgcagatcaagaggtccccgg

SEQ ID NO: 35755 - DNA, 22 bp, Artificial Sequence
  Probe
ttgagatactgactagtctggt

SEQ ID NO: 35756 - DNA, 23 bp, Artificial Sequence
  Probe
ttgagatactgactagtctggtg

SEQ ID NO: 35757 - DNA, 24 bp, Artificial Sequence
  Probe
ttgagatactgactagtctggtgt

SEQ ID NO: 35758 - DNA, 25 bp, Artificial Sequence
  Probe
ttgagatactgactagtctggtgtt

SEQ ID NO: 35759 - DNA, 26 bp, Artificial Sequence
  Probe
ttgagatactgactagtctggtgtta

SEQ ID NO: 35760 - DNA, 27 bp, Artificial Sequence
  Probe
ttgagatactgactagtctggtgttat

SEQ ID NO: 35761 - DNA, 28 bp, Artificial Sequence
  Probe
ttgagatactgactagtctggtgttatt

SEQ ID NO: 35762 - DNA, 29 bp, Artificial Sequence
  Probe
ttgagatactgactagtctggtgttattt

SEQ ID NO: 35763 - DNA, 23 bp, Artificial Sequence
  Probe
ttgatagagtaaataataggagc

SEQ ID NO: 35764 - DNA, 25 bp, Artificial Sequence
  Probe
ttgatagagtaaataataggagctt

SEQ ID NO: 35765 - DNA, 30 bp, Artificial Sequence
  Probe
ttgatagagtaaataataggagcttaaacc

SEQ ID NO: 35766 - DNA, 32 bp, Artificial Sequence
  Probe
ttgatagagtaaataataggagcttaaacccc

SEQ ID NO: 35767 - DNA, 33 bp, Artificial Sequence
  Probe
ttgatagagtaaataataggagcttaaaccccc

SEQ ID NO: 35768 - DNA, 36 bp, Artificial Sequence
  Probe
ttgatagagtaaataataggagcttaaaccccctta

SEQ ID NO: 35769 - DNA, 19 bp, Artificial Sequence
  Probe
ttgattagggtgcttagct

SEQ ID NO: 35770 - DNA, 22 bp, Artificial Sequence
  Probe
ttgattagggtgcttagctgtt

SEQ ID NO: 35771 - DNA, 26 bp, Artificial Sequence
  Probe
ttgattagggtgcttagctgttaact

SEQ ID NO: 35772 - DNA, 40 bp, Artificial Sequence
  Probe
ttgattagggtgcttagctgttaactaagtgtttgtgggt

SEQ ID NO: 35773 - DNA, 36 bp, Artificial Sequence
  Probe
ttgcaaattcgaagaagcagcttcaaacctgccggg

SEQ ID NO: 35774 - DNA, 18 bp, Artificial Sequence
  Probe
ttgcacgtatgaggcccc

SEQ ID NO: 35775 - DNA, 23 bp, Artificial Sequence
  Probe
ttgcacgtatgaggccccgggtt

SEQ ID NO: 35776 - DNA, 24 bp, Artificial Sequence
  Probe
ttgcacgtatgaggccccgggttc

SEQ ID NO: 35777 - DNA, 22 bp, Artificial Sequence
  Probe
ttgcatgtatgaggccccgggt

SEQ ID NO: 35778 - DNA, 23 bp, Artificial Sequence
  Probe
ttgcatgtatgaggccccgggtt

SEQ ID NO: 35779 - DNA, 17 bp, Artificial Sequence
  Probe
ttgccatgttaacgttt

SEQ ID NO: 35780 - DNA, 18 bp, Artificial Sequence
  Probe
ttgccatgttaacgtttt

SEQ ID NO: 35781 - DNA, 23 bp, Artificial Sequence
  Probe
ttggacgaaccagagtgtagctt

SEQ ID NO: 35782 - DNA, 27 bp, Artificial Sequence
  Probe
ttggacgaaccagagtgtagcttaaca

SEQ ID NO: 35783 - DNA, 29 bp, Artificial Sequence
  Probe
ttggacgaaccagagtgtagcttaacaca

SEQ ID NO: 35784 - DNA, 36 bp, Artificial Sequence
  Probe
ttggacgaaccagagtgtagcttaacacaaagcacc

SEQ ID NO: 35785 - DNA, 33 bp, Artificial Sequence
  Probe
ttggactgtaaatctaaagacaggggttaggcc

SEQ ID NO: 35786 - DNA, 34 bp, Artificial Sequence
  Probe
ttggactgtaaatctaaagacaggggttaggcct

SEQ ID NO: 35787 - DNA, 35 bp, Artificial Sequence
  Probe
ttggactgtaaatctaaagacaggggttaggcctc

SEQ ID NO: 35788 - DNA, 36 bp, Artificial Sequence
  Probe
ttggattctcagggatgggttcgattctcatagtcc

SEQ ID NO: 35789 - DNA, 28 bp, Artificial Sequence
  Probe
ttggcctcctaagccagggattgtgggt

SEQ ID NO: 35790 - DNA, 18 bp, Artificial Sequence
  Probe
ttggctgtgtccttagac

SEQ ID NO: 35791 - DNA, 19 bp, Artificial Sequence
  Probe
ttggctgtgtccttagaca

SEQ ID NO: 35792 - DNA, 20 bp, Artificial Sequence
  Probe
ttggctgttaactaaaaggt

SEQ ID NO: 35793 - DNA, 22 bp, Artificial Sequence
  Probe
ttggctgttaactaaaaggttg

SEQ ID NO: 35794 - DNA, 23 bp, Artificial Sequence
  Probe
ttggctgttaactaaaaggttgg

SEQ ID NO: 35795 - DNA, 20 bp, Artificial Sequence
  Probe
ttgggagagcgttagactga

SEQ ID NO: 35796 - DNA, 21 bp, Artificial Sequence
  Probe
ttgggagagcgttagactgaa

SEQ ID NO: 35797 - DNA, 15 bp, Artificial Sequence
  Probe
ttggggggttcgatt

SEQ ID NO: 35798 - DNA, 17 bp, Artificial Sequence
  Probe
ttggggggttcgattcc

SEQ ID NO: 35799 - DNA, 18 bp, Artificial Sequence
  Probe
ttggggggttcgattcct

SEQ ID NO: 35800 - DNA, 22 bp, Artificial Sequence
  Probe
ttgggtccgagaggtcccgggt

SEQ ID NO: 35801 - DNA, 23 bp, Artificial Sequence
  Probe
ttgggtccgagaggtcccgggtt

SEQ ID NO: 35802 - DNA, 17 bp, Artificial Sequence
  Probe
ttgggtgcgagaggtcc

SEQ ID NO: 35803 - DNA, 19 bp, Artificial Sequence
  Probe
ttgggtgcgagaggtcccg

SEQ ID NO: 35804 - DNA, 20 bp, Artificial Sequence
  Probe
ttgggtgcgagaggtcccgg

SEQ ID NO: 35805 - DNA, 24 bp, Artificial Sequence
  Probe
ttgggtgcgagaggtcccgggttc

SEQ ID NO: 35806 - DNA, 21 bp, Artificial Sequence
  Probe
ttgggtgctaatggtggagtt

SEQ ID NO: 35807 - DNA, 22 bp, Artificial Sequence
  Probe
ttgggtgctaatggtggagtta

SEQ ID NO: 35808 - DNA, 23 bp, Artificial Sequence
  Probe
ttgggtgctaatggtggagttaa

SEQ ID NO: 35809 - DNA, 24 bp, Artificial Sequence
  Probe
ttgggtgctaatggtggagttaaa

SEQ ID NO: 35810 - DNA, 25 bp, Artificial Sequence
  Probe
ttgggtgctaatggtggagttaaag

SEQ ID NO: 35811 - DNA, 26 bp, Artificial Sequence
  Probe
ttgggtgctaatggtggagttaaaga

SEQ ID NO: 35812 - DNA, 27 bp, Artificial Sequence
  Probe
ttgggtgctaatggtggagttaaagac

SEQ ID NO: 35813 - DNA, 28 bp, Artificial Sequence
  Probe
ttgggtgctaatggtggagttaaagact

SEQ ID NO: 35814 - DNA, 31 bp, Artificial Sequence
  Probe
ttgggtgctaatggtggagttaaagactttt

SEQ ID NO: 35815 - DNA, 39 bp, Artificial Sequence
  Probe
ttgggtgctaatggtggagttaaagactttttctctgat

SEQ ID NO: 35816 - DNA, 40 bp, Artificial Sequence; identical to SEQ ID NO: 8480
  Probe

SEQ ID NO: 35817 - DNA, 16 bp, Artificial Sequence
  Probe
ttggtagagcggagga

SEQ ID NO: 35818 - DNA, 17 bp, Artificial Sequence
  Probe
ttggtagagcggaggac

SEQ ID NO: 35819 - DNA, 18 bp, Artificial Sequence
  Probe
ttggtagagcggaggact

SEQ ID NO: 35820 - DNA, 19 bp, Artificial Sequence
  Probe
ttggtagagcggaggactg

SEQ ID NO: 35821 - DNA, 21 bp, Artificial Sequence
  Probe
ttggtagagcggaggactgta

SEQ ID NO: 35822 - DNA, 22 bp, Artificial Sequence
  Probe
ttggtagagcggaggactgtag

SEQ ID NO: 35823 - DNA, 23 bp, Artificial Sequence
  Probe
ttggtagagcggaggactgtagt

SEQ ID NO: 35824 - DNA, 23 bp, Artificial Sequence
  Probe
ttggtcctagcctttctattagc

SEQ ID NO: 35825 - DNA, 15 bp, Artificial Sequence
  Probe
ttggtcgtggttgta

SEQ ID NO: 35826 - DNA, 16 bp, Artificial Sequence
  Probe
ttggtcgtggttgtag

SEQ ID NO: 35827 - DNA, 17 bp, Artificial Sequence
  Probe
ttggtcgtggttgtagt

SEQ ID NO: 35828 - DNA, 21 bp, Artificial Sequence
  Probe
ttggtcgtggttgtagtccgt

SEQ ID NO: 35829 - DNA, 31 bp, Artificial Sequence
  Probe
ttggtcgtggttgtagtccgtgcgagaataa

SEQ ID NO: 35830 - DNA, 32 bp, Artificial Sequence; identical to SEQ ID NO: 8483
  Probe

SEQ ID NO: 35831 - DNA, 33 bp, Artificial Sequence; identical to SEQ ID NO: 8484
  Probe

SEQ ID NO: 35832 - DNA, 35 bp, Artificial Sequence
  Probe
ttggtcgtggttgtagtccgtgcgagaataatgat

SEQ ID NO: 35833 - DNA, 36 bp, Artificial Sequence
  Probe
ttggtcgtggttgtagtccgtgcgagaataatgatg

SEQ ID NO: 35834 - DNA, 39 bp, Artificial Sequence
  Probe
ttggtcgtggttgtagtccgtgcgagaataatgatgtat

SEQ ID NO: 35835 - DNA, 42 bp, Artificial Sequence
  Probe
ttggtcgtggttgtagtccgtgcgagaataatgatgtatgct

SEQ ID NO: 35836 - DNA, 20 bp, Artificial Sequence
  Probe
ttggtctaggggtatgattc

SEQ ID NO: 35837 - DNA, 21 bp, Artificial Sequence
  Probe
ttggtctaggggtatgattct

SEQ ID NO: 35838 - DNA, 22 bp, Artificial Sequence
  Probe
ttggtctaggggtatgattctc

SEQ ID NO: 35839 - DNA, 24 bp, Artificial Sequence
  Probe
ttggtctaggggtatgattctcgc

SEQ ID NO: 35840 - DNA, 25 bp, Artificial Sequence
  Probe
ttggtctaggggtatgattctcgct

SEQ ID NO: 35841 - DNA, 26 bp, Artificial Sequence
  Probe
ttggtctaggggtatgattctcgctt

SEQ ID NO: 35842 - DNA, 25 bp, Artificial Sequence
  Probe
ttggtctaggggtatgattctcggt

SEQ ID NO: 35843 - DNA, 15 bp, Artificial Sequence
  Probe
ttggtcttaggcccc

SEQ ID NO: 35844 - DNA, 28 bp, Artificial Sequence
  Probe
ttggtcttaggccccaaaaattttggtg

SEQ ID NO: 35845 - DNA, 30 bp, Artificial Sequence
  Probe
ttggtcttaggccccaaaaattttggtgca

SEQ ID NO: 35846 - DNA, 34 bp, Artificial Sequence
  Probe
ttggtcttaggccccaaaaattttggtgcaactc

SEQ ID NO: 35847 - DNA, 36 bp, Artificial Sequence
  Probe
ttggtcttaggccccaaaaattttggtgcaactcca

SEQ ID NO: 35848 - DNA, 36 bp, Artificial Sequence
  Probe
ttggtggtatagtggtaagcatagctgccttccaag

SEQ ID NO: 35849 - DNA, 36 bp, Artificial Sequence
  Probe
ttggtggtatagtggtgagcatagctgccttccaag

SEQ ID NO: 35850 - DNA, 50 bp, Artificial Sequence
  Probe
ttggtggtatagtggtgagcatagctgccttccaagcagttgacccgggt

SEQ ID NO: 35851 - DNA, 36 bp, Artificial Sequence
  Probe
ttggtggtatagtggttagcatagctgccttccaag

SEQ ID NO: 35852 - DNA, 15 bp, Artificial Sequence
  Probe
ttggtggttcagtgg

SEQ ID NO: 35853 - DNA, 17 bp, Artificial Sequence
  Probe
ttggtggttcagtggta

SEQ ID NO: 35854 - DNA, 18 bp, Artificial Sequence
  Probe
ttggtggttcagtggtag

SEQ ID NO: 35855 - DNA, 20 bp, Artificial Sequence
  Probe
ttggtggttcagtggtagaa

SEQ ID NO: 35856 - DNA, 25 bp, Artificial Sequence
  Probe
ttggtggttcagtggtagaattctc

SEQ ID NO: 35857 - DNA, 27 bp, Artificial Sequence
  Probe
ttggtggttcagtggtagaattctcgc

SEQ ID NO: 35858 - DNA, 28 bp, Artificial Sequence
  Probe
ttggtggttcagtggtagaattctcgcc

SEQ ID NO: 35859 - DNA, 29 bp, Artificial Sequence
  Probe
ttggtggttcagtggtagaattctcgcct

SEQ ID NO: 35860 - DNA, 36 bp, Artificial Sequence
  Probe
ttggtggttcagtggtagaattctcgcctcccacgc

SEQ ID NO: 35861 - DNA, 30 bp, Artificial Sequence; identical to SEQ ID NO: 8491
  Probe

SEQ ID NO: 35862 - DNA, 31 bp, Artificial Sequence; identical to SEQ ID NO: 8492
  Probe

SEQ ID NO: 35863 - DNA, 32 bp, Artificial Sequence; identical to SEQ ID NO: 8493
  Probe

SEQ ID NO: 35864 - DNA, 33 bp, Artificial Sequence
  Probe
ttggtggttcagtggtagaattctcgcctgcca

SEQ ID NO: 35865 - DNA, 50 bp, Artificial Sequence; identical to SEQ ID NO: 8494
  Probe

SEQ ID NO: 35866 - DNA, 17 bp, Artificial Sequence
  Probe
ttgtaaacaggagatcc

SEQ ID NO: 35867 - DNA, 18 bp, Artificial Sequence
  Probe
ttgtaaacaggagatcct

SEQ ID NO: 35868 - DNA, 19 bp, Artificial Sequence
  Probe
ttgtaaaccaggggtcgcg

SEQ ID NO: 35869 - DNA, 22 bp, Artificial Sequence
  Probe
ttgtaaaccaggggtcgcgagt

SEQ ID NO: 35870 - DNA, 23 bp, Artificial Sequence
  Probe
ttgtaaaccaggggtcgcgagtt

SEQ ID NO: 35871 - DNA, 21 bp, Artificial Sequence
  Probe
ttgtaaaccggagatgaaaac

SEQ ID NO: 35872 - DNA, 32 bp, Artificial Sequence; identical to SEQ ID NO: 24781
  Probe

SEQ ID NO: 35873 - DNA, 33 bp, Artificial Sequence
  Probe
ttgtaaaccggagatgaaaacctttttccaagg

SEQ ID NO: 35874 - DNA, 35 bp, Artificial Sequence; identical to SEQ ID NO: 1799
  Probe

SEQ ID NO: 35875 - DNA, 38 bp, Artificial Sequence; identical to SEQ ID NO: 8498
  Probe

SEQ ID NO: 35876 - DNA, 17 bp, Artificial Sequence
  Probe
ttgtagtccgtgcgaga

SEQ ID NO: 35877 - DNA, 18 bp, Artificial Sequence
  Probe
ttgtagtccgtgcgagaa

SEQ ID NO: 35878 - DNA, 19 bp, Artificial Sequence
  Probe
ttgtagtccgtgcgagaat

SEQ ID NO: 35879 - DNA, 20 bp, Artificial Sequence
  Probe
ttgtagtccgtgcgagaata

SEQ ID NO: 35880 - DNA, 21 bp, Artificial Sequence
  Probe
ttgtagtccgtgcgagaataa

SEQ ID NO: 35881 - DNA, 36 bp, Artificial Sequence
  Probe
ttgtagttgaaatacaacgatggtttttcatatcat

SEQ ID NO: 35882 - DNA, 23 bp, Artificial Sequence
  Probe
ttgtcaaagttaaattataggct

SEQ ID NO: 35883 - DNA, 16 bp, Artificial Sequence
  Probe
ttgtgaatctgacaac

SEQ ID NO: 35884 - DNA, 17 bp, Artificial Sequence
  Probe
ttgtgaatctgacaaca

SEQ ID NO: 35885 - DNA, 19 bp, Artificial Sequence
  Probe
ttgtgaatctgacaacaga

SEQ ID NO: 35886 - DNA, 22 bp, Artificial Sequence
  Probe
ttgtgaatctgacaacagaggc

SEQ ID NO: 35887 - DNA, 23 bp, Artificial Sequence
  Probe
ttgtgaatctgacaacagaggct

SEQ ID NO: 35888 - DNA, 24 bp, Artificial Sequence
  Probe
ttgtgaatctgacaacagaggctt

SEQ ID NO: 35889 - DNA, 27 bp, Artificial Sequence
  Probe
ttgtgaatctgacaacagaggcttacg

SEQ ID NO: 35890 - DNA, 42 bp, Artificial Sequence
  Probe
ttgtgaatctgacaacagaggcttacgaccccttatttaccg

SEQ ID NO: 35891 - DNA, 43 bp, Artificial Sequence; identical to SEQ ID NO: 8510
  Probe

SEQ ID NO: 35892 - DNA, 18 bp, Artificial Sequence
  Probe
ttgtgaggacaatggcac

SEQ ID NO: 35893 - DNA, 19 bp, Artificial Sequence
  Probe
ttgtgaggacaatggcacg

SEQ ID NO: 35894 - DNA, 20 bp, Artificial Sequence
  Probe
ttgtgaggacaatggcacgg

SEQ ID NO: 35895 - DNA, 21 bp, Artificial Sequence
  Probe
ttgtgaggacaatggcacggc

SEQ ID NO: 35896 - DNA, 24 bp, Artificial Sequence
  Probe
ttgtgaggacaatggcacggcaag

SEQ ID NO: 35897 - DNA, 25 bp, Artificial Sequence
  Probe
ttgtgaggacaatggcacggcaagg

SEQ ID NO: 35898 - DNA, 26 bp, Artificial Sequence
  Probe
ttgtgaggacaatggcacggcaaggg

SEQ ID NO: 35899 - DNA, 27 bp, Artificial Sequence
  Probe
ttgtgaggacaatggcacggcaagggg

SEQ ID NO: 35900 - DNA, 28 bp, Artificial Sequence
  Probe
ttgtgaggacaatggcacggcaagggga

SEQ ID NO: 35901 - DNA, 29 bp, Artificial Sequence
  Probe
ttgtgaggacaatggcacggcaaggggag

SEQ ID NO: 35902 - DNA, 30 bp, Artificial Sequence; identical to SEQ ID NO: 12423
  Probe

SEQ ID NO: 35903 - DNA, 27 bp, Artificial Sequence
  Probe
ttgtggaaacaatggtacggcaagggc

SEQ ID NO: 35904 - DNA, 30 bp, Artificial Sequence
  Probe
ttgtggaaacaatggtacggcaagggcctc

SEQ ID NO: 35905 - DNA, 17 bp, Artificial Sequence
  Probe
ttgtggccgcagcaacc

SEQ ID NO: 35906 - DNA, 18 bp, Artificial Sequence
  Probe
ttgtggccgcagcaacct

SEQ ID NO: 35907 - DNA, 22 bp, Artificial Sequence
  Probe
ttgtggccgcagcaacctcggt

SEQ ID NO: 35908 - DNA, 27 bp, Artificial Sequence
  Probe
ttgtgggaacaatggcacggcaagggg

SEQ ID NO: 35909 - DNA, 30 bp, Artificial Sequence; identical to SEQ ID NO: 12431
  Probe

SEQ ID NO: 35910 - DNA, 28 bp, Artificial Sequence
  Probe
ttgtgggtttaagtcccattggtctagt

SEQ ID NO: 35911 - DNA, 18 bp, Artificial Sequence
  Probe
ttgtttctgttgagtgtg

SEQ ID NO: 35912 - DNA, 26 bp, Artificial Sequence
  Probe
tttaaacaaaacgaatgatttcgact

SEQ ID NO: 35913 - DNA, 27 bp, Artificial Sequence
  Probe
tttaaacaaaacgaatgatttcgactc

SEQ ID NO: 35914 - DNA, 17 bp, Artificial Sequence
  Probe
tttaaaggataacagct

SEQ ID NO: 35915 - DNA, 27 bp, Artificial Sequence
  Probe
tttaaaggataacagctatccattggt

SEQ ID NO: 35916 - DNA, 29 bp, Artificial Sequence
  Probe
tttaaaggataacagctatccattggtct

SEQ ID NO: 35917 - DNA, 30 bp, Artificial Sequence
  Probe
tttaaaggataacagctatccattggtctt

SEQ ID NO: 35918 - DNA, 31 bp, Artificial Sequence
  Probe
tttaaaggataacagctatccattggtctta

SEQ ID NO: 35919 - DNA, 32 bp, Artificial Sequence
  Probe
tttaaaggataacagctatccattggtcttag

SEQ ID NO: 35920 - DNA, 35 bp, Artificial Sequence
  Probe
tttaaaggataacagctatccattggtcttaggcc

SEQ ID NO: 35921 - DNA, 36 bp, Artificial Sequence
  Probe
tttaaaggataacagctatccattggtcttaggccc

SEQ ID NO: 35922 - DNA, 37 bp, Artificial Sequence
  Probe
tttaaaggataacagctatccattggtcttaggcccc

SEQ ID NO: 35923 - DNA, 24 bp, Artificial Sequence
  Probe
tttaaattagaatcttagctttgg

SEQ ID NO: 35924 - DNA, 36 bp, Artificial Sequence
  Probe
tttaaattagaatcttagctttgggtgctaatggtg

SEQ ID NO: 35925 - DNA, 36 bp, Artificial Sequence
  Probe
tttaaccaaaacatcagattgtgaatctgacaacag

SEQ ID NO: 35926 - DNA, 17 bp, Artificial Sequence
  Probe
tttaagtcccattggtc

SEQ ID NO: 35927 - DNA, 23 bp, Artificial Sequence
  Probe
tttaagttaaagattaagagaac

SEQ ID NO: 35928 - DNA, 24 bp, Artificial Sequence
  Probe
tttaagttaaagattaagagaacc

SEQ ID NO: 35929 - DNA, 29 bp, Artificial Sequence
  Probe
tttaagttaaagattaagagaaccaacac

SEQ ID NO: 35930 - DNA, 30 bp, Artificial Sequence
  Probe
tttaagttaaagattaagagaaccaacacc

SEQ ID NO: 35931 - DNA, 31 bp, Artificial Sequence
  Probe
tttaagttaaagattaagagaaccaacacct

SEQ ID NO: 35932 - DNA, 36 bp, Artificial Sequence
  Probe
tttaagttaaagattaagagaaccaacacctcttta

SEQ ID NO: 35933 - DNA, 36 bp, Artificial Sequence
  Probe
tttaatctgagggtccagggttcaagtccctgttcg

SEQ ID NO: 35934 - DNA, 43 bp, Artificial Sequence
  Probe
tttaatctgagggtccagggttcaagtccctgttcgggcggca

SEQ ID NO: 35935 - DNA, 20 bp, Artificial Sequence
  Probe
tttacacgcagaaggtcctg

SEQ ID NO: 35936 - DNA, 16 bp, Artificial Sequence
  Probe
tttacagtcagaggtt

SEQ ID NO: 35937 - DNA, 17 bp, Artificial Sequence
  Probe
tttacagtcagaggttc

SEQ ID NO: 35938 - DNA, 18 bp, Artificial Sequence
  Probe
tttacagtcagaggttca

SEQ ID NO: 35939 - DNA, 22 bp, Artificial Sequence
  Probe
tttacagtcagaggttcaattc

SEQ ID NO: 35940 - DNA, 23 bp, Artificial Sequence
  Probe
tttacagtcagaggttcaattcc

SEQ ID NO: 35941 - DNA, 15 bp, Artificial Sequence
  Probe
tttagacgggctcac

SEQ ID NO: 35942 - DNA, 16 bp, Artificial Sequence
  Probe
tttagacgggctcaca

SEQ ID NO: 35943 - DNA, 17 bp, Artificial Sequence
  Probe
tttagacgggctcacat

SEQ ID NO: 35944 - DNA, 18 bp, Artificial Sequence
  Probe
tttagacgggctcacatc

SEQ ID NO: 35945 - DNA, 19 bp, Artificial Sequence
  Probe
tttagacgggctcacatca

SEQ ID NO: 35946 - DNA, 20 bp, Artificial Sequence
  Probe
tttagacgggctcacatcac

SEQ ID NO: 35947 - DNA, 21 bp, Artificial Sequence
  Probe
tttagacgggctcacatcacc

SEQ ID NO: 35948 - DNA, 22 bp, Artificial Sequence
  Probe
tttagacgggctcacatcaccc

SEQ ID NO: 35949 - DNA, 23 bp, Artificial Sequence
  Probe
tttagacgggctcacatcacccc

SEQ ID NO: 35950 - DNA, 26 bp, Artificial Sequence
  Probe
tttagacgggctcacatcaccccata

SEQ ID NO: 35951 - DNA, 28 bp, Artificial Sequence
  Probe
tttagacgggctcacatcaccccataaa

SEQ ID NO: 35952 - DNA, 29 bp, Artificial Sequence
  Probe
tttagacgggctcacatcaccccataaac

SEQ ID NO: 35953 - DNA, 30 bp, Artificial Sequence; identical to SEQ ID NO: 24807
  Probe

SEQ ID NO: 35954 - DNA, 19 bp, Artificial Sequence
  Probe
tttatgtagcttacctcct

SEQ ID NO: 35955 - DNA, 15 bp, Artificial Sequence
  Probe
tttcaacttaacttg

SEQ ID NO: 35956 - DNA, 17 bp, Artificial Sequence
  Probe
tttcaacttaacttgac

SEQ ID NO: 35957 - DNA, 21 bp, Artificial Sequence
  Probe
tttcaacttaacttgaccgct

SEQ ID NO: 35958 - DNA, 23 bp, Artificial Sequence
  Probe
tttcaacttaacttgaccgctct

SEQ ID NO: 35959 - DNA, 24 bp, Artificial Sequence
  Probe
tttcaacttaacttgaccgctctg

SEQ ID NO: 35960 - DNA, 25 bp, Artificial Sequence
  Probe
tttcaacttaacttgaccgctctga

SEQ ID NO: 35961 - DNA, 26 bp, Artificial Sequence
  Probe
tttcaacttaacttgaccgctctgag

SEQ ID NO: 35962 - DNA, 27 bp, Artificial Sequence
  Probe
tttcaacttaacttgaccgctctgagc

SEQ ID NO: 35963 - DNA, 36 bp, Artificial Sequence
  Probe
tttcacccaggcggcccgggttcgactcccggtgtg

SEQ ID NO: 35964 - DNA, 15 bp, Artificial Sequence
  Probe
tttcaccgccgcggc

SEQ ID NO: 35965 - DNA, 17 bp, Artificial Sequence
  Probe
tttcaccgccgcggccc

SEQ ID NO: 35966 - DNA, 33 bp, Artificial Sequence
  Probe
tttcataactttgtcaaagttaaattataggct

SEQ ID NO: 35967 - DNA, 16 bp, Artificial Sequence
  Probe
tttcatatcattggtc

SEQ ID NO: 35968 - DNA, 29 bp, Artificial Sequence
  Probe
tttcatatcattggtcgtggttgtagtcc

SEQ ID NO: 35969 - DNA, 37 bp, Artificial Sequence
  Probe
tttcatatcattggtcgtggttgtagtccgtgcgaga

SEQ ID NO: 35970 - DNA, 38 bp, Artificial Sequence
  Probe
tttcatatcattggtcgtggttgtagtccgtgcgagaa

SEQ ID NO: 35971 - DNA, 42 bp, Artificial Sequence
  Probe
tttcatatcattggtcgtggttgtagtccgtgcgagaataat

SEQ ID NO: 35972 - DNA, 17 bp, Artificial Sequence
  Probe
tttcatattgaattgca

SEQ ID NO: 35973 - DNA, 36 bp, Artificial Sequence
  Probe
tttcatattgaattgcaaattcgaagaagcagcttc

SEQ ID NO: 35974 - DNA, 31 bp, Artificial Sequence
  Probe
tttccgtagtgtagcggttatcacattcgcc

SEQ ID NO: 35975 - DNA, 32 bp, Artificial Sequence
  Probe
tttccgtagtgtagcggttatcacattcgcct

SEQ ID NO: 35976 - DNA, 22 bp, Artificial Sequence
  Probe
tttccgtagtgtagtggtcatc

SEQ ID NO: 35977 - DNA, 36 bp, Artificial Sequence
  Probe
tttccgtagtgtagtggtcatcacgttcgcctaaca

SEQ ID NO: 35978 - DNA, 22 bp, Artificial Sequence
  Probe
tttccgtagtgtagtggttatc

SEQ ID NO: 35979 - DNA, 30 bp, Artificial Sequence; identical to SEQ ID NO: 24813
  Probe

SEQ ID NO: 35980 - DNA, 31 bp, Artificial Sequence; identical to SEQ ID NO: 24814
  Probe

SEQ ID NO: 35981 - DNA, 32 bp, Artificial Sequence; identical to SEQ ID NO: 24815
  Probe

SEQ ID NO: 35982 - DNA, 38 bp, Artificial Sequence
  Probe
tttccgtagtgtagtggttatcacgttcgcctaacacg

SEQ ID NO: 35983 - DNA, 33 bp, Artificial Sequence; identical to SEQ ID NO: 24817
  Probe

SEQ ID NO: 35984 - DNA, 34 bp, Artificial Sequence; identical to SEQ ID NO: 24818
  Probe

SEQ ID NO: 35985 - DNA, 36 bp, Artificial Sequence
  Probe
tttccgtagtgtagtggttatcacgttcgcctcaca

SEQ ID NO: 35986 - DNA, 38 bp, Artificial Sequence
  Probe
tttccgtagtgtagtggttatcacgttcgcctcacacg

SEQ ID NO: 35987 - DNA, 31 bp, Artificial Sequence
  Probe
tttccgtggtgtagtggttatcacattcgcc

SEQ ID NO: 35988 - DNA, 32 bp, Artificial Sequence
  Probe
tttccgtggtgtagtggttatcacattcgcct

SEQ ID NO: 35989 - DNA, 24 bp, Artificial Sequence
  Probe
tttcctttccgtttcatctttctc

SEQ ID NO: 35990 - DNA, 22 bp, Artificial Sequence
  Probe
tttcgactcattaaattatgat

SEQ ID NO: 35991 - DNA, 33 bp, Artificial Sequence
  Probe
tttcgactcattaaattatgataatcatattta

SEQ ID NO: 35992 - DNA, 34 bp, Artificial Sequence
  Probe
tttcgactcattaaattatgataatcatatttac

SEQ ID NO: 35993 - DNA, 35 bp, Artificial Sequence
  Probe
tttcgactcattaaattatgataatcatatttacc

SEQ ID NO: 35994 - DNA, 36 bp, Artificial Sequence
  Probe
tttcgactcattaaattatgataatcatatttacca

SEQ ID NO: 35995 - DNA, 25 bp, Artificial Sequence
  Probe
tttctaggactatgagaatcgaacc

SEQ ID NO: 35996 - DNA, 26 bp, Artificial Sequence
  Probe
tttctaggactatgagaatcgaaccc

SEQ ID NO: 35997 - DNA, 15 bp, Artificial Sequence
  Probe
tttctggaggttttt

SEQ ID NO: 35998 - DNA, 16 bp, Artificial Sequence
  Probe
tttctggtctccggat

SEQ ID NO: 35999 - DNA, 21 bp, Artificial Sequence
  Probe
tttgaatccagcaatccgagt

SEQ ID NO: 36000 - DNA, 20 bp, Artificial Sequence
  Probe
tttgaatccagcgatccgag

SEQ ID NO: 36001 - DNA, 21 bp, Artificial Sequence
  Probe
tttgaatccagcgatccgagt

SEQ ID NO: 36002 - DNA, 22 bp, Artificial Sequence
  Probe
tttgaatccagcgatccgagtt

SEQ ID NO: 36003 - DNA, 27 bp, Artificial Sequence
  Probe
tttgactgcagatcaagaggtccccgg

SEQ ID NO: 36004 - DNA, 28 bp, Artificial Sequence
  Probe
tttgactgcagatcaagaggtccccggt

SEQ ID NO: 36005 - DNA, 23 bp, Artificial Sequence
  Probe
tttgagatactgactagtctggt

SEQ ID NO: 36006 - DNA, 24 bp, Artificial Sequence
  Probe
tttgagatactgactagtctggtg

SEQ ID NO: 36007 - DNA, 25 bp, Artificial Sequence
  Probe
tttgagatactgactagtctggtgt

SEQ ID NO: 36008 - DNA, 29 bp, Artificial Sequence
  Probe
tttgagatactgactagtctggtgttatt

SEQ ID NO: 36009 - DNA, 30 bp, Artificial Sequence
  Probe
tttgagatactgactagtctggtgttattt

SEQ ID NO: 36010 - DNA, 24 bp, Artificial Sequence
  Probe
tttgatagagtaaataataggagc

SEQ ID NO: 36011 - DNA, 26 bp, Artificial Sequence
  Probe
tttgatagagtaaataataggagctt

SEQ ID NO: 36012 - DNA, 31 bp, Artificial Sequence
  Probe
tttgatagagtaaataataggagcttaaacc

SEQ ID NO: 36013 - DNA, 33 bp, Artificial Sequence
  Probe
tttgatagagtaaataataggagcttaaacccc

SEQ ID NO: 36014 - DNA, 36 bp, Artificial Sequence
  Probe
tttgatagagtaaataataggagcttaaaccccctt

SEQ ID NO: 36015 - DNA, 18 bp, Artificial Sequence
  Probe
tttgcacgtatgaggccc

SEQ ID NO: 36016 - DNA, 20 bp, Artificial Sequence
  Probe
tttgcacgtatgaggccccg

SEQ ID NO: 36017 - DNA, 22 bp, Artificial Sequence
  Probe
tttgcacgtatgaggccccggg

SEQ ID NO: 36018 - DNA, 25 bp, Artificial Sequence
  Probe
tttgcacgtatgaggccccgggttc

SEQ ID NO: 36019 - DNA, 19 bp, Artificial Sequence
  Probe
tttgcatgtatgaggcccc

SEQ ID NO: 36020 - DNA, 23 bp, Artificial Sequence
  Probe
tttgcatgtatgaggccccgggt

SEQ ID NO: 36021 - DNA, 24 bp, Artificial Sequence
  Probe
tttgcatgtatgaggccccgggtt

SEQ ID NO: 36022 - DNA, 23 bp, Artificial Sequence
  Probe
tttgcatgtatgaggcctcgggt

SEQ ID NO: 36023 - DNA, 23 bp, Artificial Sequence
  Probe
tttgcatgtatgaggtcccgggt

SEQ ID NO: 36024 - DNA, 24 bp, Artificial Sequence
  Probe
tttgcatgtatgaggtcccgggtt

SEQ ID NO: 36025 - DNA, 36 bp, Artificial Sequence
  Probe
tttgcggacatccttaggtcgctggttcgattccgg

SEQ ID NO: 36026 - DNA, 36 bp, Artificial Sequence
  Probe
tttggattctcagggatgggttcgattctcatagtc

SEQ ID NO: 36027 - DNA, 24 bp, Artificial Sequence
  Probe
tttggccttttcgagatactgttt

SEQ ID NO: 36028 - DNA, 25 bp, Artificial Sequence
  Probe
tttggccttttcgagatactgtttt

SEQ ID NO: 36029 - DNA, 24 bp, Artificial Sequence
  Probe
tttgggtccgagaggtcccgggtt

SEQ ID NO: 36030 - DNA, 18 bp, Artificial Sequence
  Probe
tttgggtgcgagaggtcc

SEQ ID NO: 36031 - DNA, 20 bp, Artificial Sequence
  Probe
tttgggtgcgagaggtcccg

SEQ ID NO: 36032 - DNA, 21 bp, Artificial Sequence
  Probe
tttgggtgcgagaggtcccgg

SEQ ID NO: 36033 - DNA, 25 bp, Artificial Sequence
  Probe
tttgggtgcgagaggtcccgggttc

SEQ ID NO: 36034 - DNA, 23 bp, Artificial Sequence
  Probe
tttgggtgctaatggtggagtta

SEQ ID NO: 36035 - DNA, 41 bp, Artificial Sequence
  Probe
tttgggtgctaatggtggagttaaagactttttctctgatt

SEQ ID NO: 36036 - DNA, 24 bp, Artificial Sequence
  Probe
tttggtcctagcctttctattagc

SEQ ID NO: 36037 - DNA, 24 bp, Artificial Sequence
  Probe
tttgtcaaagttaaattataggct

SEQ ID NO: 36038 - DNA, 36 bp, Artificial Sequence
  Probe
tttgtcaaagttaaattataggctaaatcctatata

SEQ ID NO: 36039 - DNA, 15 bp, Artificial Sequence
  Probe
tttgtccttggaaaa

SEQ ID NO: 36040 - DNA, 17 bp, Artificial Sequence
  Probe
tttgtccttggaaaaag

SEQ ID NO: 36041 - DNA, 30 bp, Artificial Sequence
  Probe
tttgtccttggaaaaaggttttcatctccg

SEQ ID NO: 36042 - DNA, 16 bp, Artificial Sequence
  Probe
tttgtgggtttaagtc

SEQ ID NO: 36043 - DNA, 25 bp, Artificial Sequence
  Probe
tttgtgggtttaagtcccattggtc

SEQ ID NO: 36044 - DNA, 29 bp, Artificial Sequence
  Probe
tttgtgggtttaagtcccattggtctagt

SEQ ID NO: 36045 - DNA, 30 bp, Artificial Sequence; identical to SEQ ID NO: 24832
  Probe

SEQ ID NO: 36046 - DNA, 31 bp, Artificial Sequence
  Probe
tttgtgggtttaagtcccattggtctagtaa

SEQ ID NO: 36047 - DNA, 18 bp, Artificial Sequence
  Probe
ttttaaaggataacagct

SEQ ID NO: 36048 - DNA, 28 bp, Artificial Sequence
  Probe
ttttaaaggataacagctatccattggt

SEQ ID NO: 36049 - DNA, 30 bp, Artificial Sequence
  Probe
ttttaaaggataacagctatccattggtct

SEQ ID NO: 36050 - DNA, 31 bp, Artificial Sequence
  Probe
ttttaaaggataacagctatccattggtctt

SEQ ID NO: 36051 - DNA, 32 bp, Artificial Sequence
  Probe
ttttaaaggataacagctatccattggtctta

SEQ ID NO: 36052 - DNA, 33 bp, Artificial Sequence
  Probe
ttttaaaggataacagctatccattggtcttag

SEQ ID NO: 36053 - DNA, 36 bp, Artificial Sequence
  Probe
ttttaaaggataacagctatccattggtcttaggcc

SEQ ID NO: 36054 - DNA, 38 bp, Artificial Sequence
  Probe
ttttaaaggataacagctatccattggtcttaggcccc

SEQ ID NO: 36055 - DNA, 24 bp, Artificial Sequence
  Probe
ttttaagttaaagattaagagaac

SEQ ID NO: 36056 - DNA, 25 bp, Artificial Sequence
  Probe
ttttaagttaaagattaagagaacc

SEQ ID NO: 36057 - DNA, 26 bp, Artificial Sequence
  Probe
ttttaagttaaagattaagagaacca

SEQ ID NO: 36058 - DNA, 29 bp, Artificial Sequence
  Probe
ttttaagttaaagattaagagaaccaaca

SEQ ID NO: 36059 - DNA, 30 bp, Artificial Sequence
  Probe
ttttaagttaaagattaagagaaccaacac

SEQ ID NO: 36060 - DNA, 31 bp, Artificial Sequence
  Probe
ttttaagttaaagattaagagaaccaacacc

SEQ ID NO: 36061 - DNA, 32 bp, Artificial Sequence
  Probe
ttttaagttaaagattaagagaaccaacacct

SEQ ID NO: 36062 - DNA, 33 bp, Artificial Sequence
  Probe
ttttaagttaaagattaagagaaccaacacctc

SEQ ID NO: 36063 - DNA, 36 bp, Artificial Sequence
  Probe
ttttaagttaaagattaagagaaccaacacctcttt

SEQ ID NO: 36064 - DNA, 36 bp, Artificial Sequence
  Probe
ttttaatctgagggtccagggttcaagtccctgttc

SEQ ID NO: 36065 - DNA, 43 bp, Artificial Sequence
  Probe
ttttaatctgagggtccagggttcaagtccctgttcgggcggc

SEQ ID NO: 36066 - DNA, 44 bp, Artificial Sequence
  Probe
ttttaatctgagggtccagggttcaagtccctgttcgggcggca

SEQ ID NO: 36067 - DNA, 43 bp, Artificial Sequence
  Probe
ttttaatctgagggtccagggttcaagtccctgttcgggcgtc

SEQ ID NO: 36068 - DNA, 36 bp, Artificial Sequence
  Probe
ttttaatctgagggtccagggttcatgtccctgttc

SEQ ID NO: 36069 - DNA, 17 bp, Artificial Sequence
  Probe
ttttcacccaggcggcc

SEQ ID NO: 36070 - DNA, 18 bp, Artificial Sequence
  Probe
ttttcacccaggcggccc

SEQ ID NO: 36071 - DNA, 19 bp, Artificial Sequence
  Probe
ttttcacccaggcggcccg

SEQ ID NO: 36072 - DNA, 44 bp, Artificial Sequence
  Probe
ttttcacccaggcggcccgggttcgactcccggtgtgggaacgc

SEQ ID NO: 36073 - DNA, 44 bp, Artificial Sequence
  Probe
ttttcacccaggcggcccgggttcgactcccggtgtgggaatga

SEQ ID NO: 36074 - DNA, 18 bp, Artificial Sequence
  Probe
ttttcacccaggtggccc

SEQ ID NO: 36075 - DNA, 17 bp, Artificial Sequence
  Probe
ttttcatatcattggtc

SEQ ID NO: 36076 - DNA, 29 bp, Artificial Sequence
  Probe
ttttcatatcattggtcgtggttgtagtc

SEQ ID NO: 36077 - DNA, 30 bp, Artificial Sequence; identical to SEQ ID NO: 12458
  Probe

SEQ ID NO: 36078 - DNA, 35 bp, Artificial Sequence
  Probe
ttttcatatcattggtcgtggttgtagtccgtgcg

SEQ ID NO: 36079 - DNA, 39 bp, Artificial Sequence
  Probe
ttttcatatcattggtcgtggttgtagtccgtgcgagaa

SEQ ID NO: 36080 - DNA, 43 bp, Artificial Sequence
  Probe
ttttcatatcattggtcgtggttgtagtccgtgcgagaataat

SEQ ID NO: 36081 - DNA, 18 bp, Artificial Sequence
  Probe
ttttcatattgaattgca

SEQ ID NO: 36082 - DNA, 15 bp, Artificial Sequence
  Probe
ttttcccggcggcgg

SEQ ID NO: 36083 - DNA, 16 bp, Artificial Sequence
  Probe
ttttcccggcggcggg

SEQ ID NO: 36084 - DNA, 20 bp, Artificial Sequence
  Probe
ttttcccggcggcgggagaa

SEQ ID NO: 36085 - DNA, 36 bp, Artificial Sequence
  Probe
ttttggattctcagggatgggttcgattctcatagt

SEQ ID NO: 36086 - DNA, 39 bp, Artificial Sequence
  Probe
ttttggattctcagggatgggttcgattctcatagtcct

SEQ ID NO: 36087 - DNA, 15 bp, Artificial Sequence
  Probe
ttttggtgcaactcc

SEQ ID NO: 36088 - DNA, 18 bp, Artificial Sequence
  Probe
tttttcatatcattggtc

SEQ ID NO: 36089 - DNA, 39 bp, Artificial Sequence
  Probe
tttttcatatcattggtcgtggttgtagtccgtgcgaga

SEQ ID NO: 36090 - DNA, 40 bp, Artificial Sequence
  Probe
tttttcatatcattggtcgtggttgtagtccgtgcgagaa

SEQ ID NO: 36091 - DNA, 15 bp, Artificial Sequence
  Probe
tttttcccggcggcg

SEQ ID NO: 36092 - DNA, 16 bp, Artificial Sequence
  Probe
tttttcccggcggcgg

SEQ ID NO: 36093 - DNA, 17 bp, Artificial Sequence
  Probe
tttttcccggcggcggg

SEQ ID NO: 36094 - DNA, 21 bp, Artificial Sequence
  Probe
tttttcccggcggcgggagaa

SEQ ID NO: 36095 - DNA, 15 bp, Artificial Sequence
  Probe
ttttttcccggcggc

SEQ ID NO: 36096 - DNA, 16 bp, Artificial Sequence
  Probe
ttttttcccggcggcg

SEQ ID NO: 36097 - DNA, 17 bp, Artificial Sequence
  Probe
ttttttcccggcggcgg

SEQ ID NO: 36098 - DNA, 18 bp, Artificial Sequence
  Probe
ttttttcccggcggcggg

SEQ ID NO: 36099 - DNA, 22 bp, Artificial Sequence
  Probe
ttttttcccggcggcgggagaa

SEQ ID NO: 36100 - DNA, 50 bp, Artificial Sequence; identical to SEQ ID NO: 4
  Probe

SEQ ID NO: 36101 - DNA, 50 bp, Artificial Sequence; identical to SEQ ID NO: 14
  Probe

SEQ ID NO: 36102 - DNA, 36 bp, Artificial Sequence; identical to SEQ ID NO: 21
  Probe

SEQ ID NO: 36103 - DNA, 50 bp, Artificial Sequence; identical to SEQ ID NO: 25
  Probe

SEQ ID NO: 36104 - DNA, 50 bp, Artificial Sequence; identical to SEQ ID NO: 32
  Probe

SEQ ID NO: 36105 - DNA, 32 bp, Artificial Sequence; identical to SEQ ID NO: 14644
  Probe

SEQ ID NO: 36106 - DNA, 34 bp, Artificial Sequence; identical to SEQ ID NO: 33
  Probe

SEQ ID NO: 36107 - DNA, 35 bp, Artificial Sequence; identical to SEQ ID NO: 34
  Probe

SEQ ID NO: 36108 - DNA, 50 bp, Artificial Sequence; identical to SEQ ID NO: 39
  Probe

SEQ ID NO: 36109 - DNA, 18 bp, Artificial Sequence
  Probe
aacagctatccattggtc

SEQ ID NO: 36110 - DNA, 50 bp, Artificial Sequence; identical to SEQ ID NO: 42
  Probe

SEQ ID NO: 36111 - DNA, 50 bp, Artificial Sequence; identical to SEQ ID NO: 47
  Probe

SEQ ID NO: 36112 - DNA, 50 bp, Artificial Sequence; identical to SEQ ID NO: 2201
  Probe

SEQ ID NO: 36113 - DNA, 27 bp, Artificial Sequence
  Probe
aagattgagggttcgagtcccttcgtg

SEQ ID NO: 36114 - DNA, 29 bp, Artificial Sequence
  Probe
aagattgagggttcgagtcccttcgtggt

SEQ ID NO: 36115 - DNA, 31 bp, Artificial Sequence; identical to SEQ ID NO: 2265
  Probe

SEQ ID NO: 36116 - DNA, 18 bp, Artificial Sequence
  Probe
aagccagggattgtgggt

SEQ ID NO: 36117 - DNA, 33 bp, Artificial Sequence
  Probe
aagcgtgctgggcccataacccagaggtcgatg

SEQ ID NO: 36118 - DNA, 50 bp, Artificial Sequence; identical to SEQ ID NO: 84
  Probe

SEQ ID NO: 36119 - DNA, 29 bp, Artificial Sequence
  Probe
aaggtccctggttcgatcccgggtttcgg

SEQ ID NO: 36120 - DNA, 31 bp, Artificial Sequence
  Probe
aaggtccctggttcgatcccgggtttcggca

SEQ ID NO: 36121 - DNA, 29 bp, Artificial Sequence
  Probe
aaggtcctgggttcgagccccagtggaac

SEQ ID NO: 36122 - DNA, 30 bp, Artificial Sequence; identical to SEQ ID NO: 8941
  Probe

SEQ ID NO: 36123 - DNA, 28 bp, Artificial Sequence
  Probe
aaggtcgcgggttcgatccccgtactgg

SEQ ID NO: 36124 - DNA, 17 bp, Artificial Sequence
  Probe
aatccagcgatccgagt

SEQ ID NO: 36125 - DNA, 20 bp, Artificial Sequence
  Probe
aatccagcgatccgagttca

SEQ ID NO: 36126 - DNA, 34 bp, Artificial Sequence; identical to SEQ ID NO: 15226
  Probe

SEQ ID NO: 36127 - DNA, 35 bp, Artificial Sequence
  Probe
aatccagcgatccgagttcaaatctcggtggaacc

SEQ ID NO: 36128 - DNA, 34 bp, Artificial Sequence; identical to SEQ ID NO: 2440
  Probe

SEQ ID NO: 36129 - DNA, 35 bp, Artificial Sequence
  Probe
aatccagcgatccgagttcaagtctcggtggaacc

SEQ ID NO: 36130 - DNA, 34 bp, Artificial Sequence
  Probe
aatccagcgatccgagttcgagtctcggtggaac

SEQ ID NO: 36131 - DNA, 20 bp, Artificial Sequence
  Probe
aatccccggcacctccacca

SEQ ID NO: 36132 - DNA, 18 bp, Artificial Sequence
  Probe
aatctgaaggtcgtgagt

SEQ ID NO: 36133 - DNA, 50 bp, Artificial Sequence; identical to SEQ ID NO: 113
  Probe

SEQ ID NO: 36134 - DNA, 50 bp, Artificial Sequence; identical to SEQ ID NO: 117
  Probe

SEQ ID NO: 36135 - DNA, 18 bp, Artificial Sequence
  Probe
acaacagaggcttacgac

SEQ ID NO: 36136 - DNA, 21 bp, Artificial Sequence
  Probe
acaacagaggcttacgacccc

SEQ ID NO: 36137 - DNA, 23 bp, Artificial Sequence
  Probe
acaacagaggcttacgacccctt

SEQ ID NO: 36138 - DNA, 28 bp, Artificial Sequence
  Probe
acaacagaggcttacgaccccttattta

SEQ ID NO: 36139 - DNA, 30 bp, Artificial Sequence; identical to SEQ ID NO: 2562
  Probe

SEQ ID NO: 36140 - DNA, 20 bp, Artificial Sequence
  Probe
acaacattcaaaaaagagta

SEQ ID NO: 36141 - DNA, 50 bp, Artificial Sequence; identical to SEQ ID NO: 124
  Probe

SEQ ID NO: 36142 - DNA, 18 bp, Artificial Sequence
  Probe
acacgcagaaggtcctgg

SEQ ID NO: 36143 - DNA, 19 bp, Artificial Sequence
  Probe
acacgcagaaggtcctggg

SEQ ID NO: 36144 - DNA, 20 bp, Artificial Sequence
  Probe
acacgcagaaggtcctgggt

SEQ ID NO: 36145 - DNA, 23 bp, Artificial Sequence
  Probe
acacgcagaaggtcctgggttcg

SEQ ID NO: 36146 - DNA, 29 bp, Artificial Sequence
  Probe
acacgcagaaggtcctgggttcgagcccc

SEQ ID NO: 36147 - DNA, 36 bp, Artificial Sequence; identical to SEQ ID NO: 12522
  Probe

SEQ ID NO: 36148 - DNA, 37 bp, Artificial Sequence; identical to SEQ ID NO: 15407
  Probe

SEQ ID NO: 36149 - DNA, 38 bp, Artificial Sequence; identical to SEQ ID NO: 12523
  Probe

SEQ ID NO: 36150 - DNA, 18 bp, Artificial Sequence
  Probe
acacgcgaaaggtccccg

SEQ ID NO: 36151 - DNA, 19 bp, Artificial Sequence
  Probe
acacgcgaaaggtccccgg

SEQ ID NO: 36152 - DNA, 20 bp, Artificial Sequence
  Probe
acacgcgaaaggtccccggt

SEQ ID NO: 36153 - DNA, 18 bp, Artificial Sequence
  Probe
acacgcgaaaggtccctg

SEQ ID NO: 36154 - DNA, 19 bp, Artificial Sequence
  Probe
acacgcgaaaggtccctgg

SEQ ID NO: 36155 - DNA, 50 bp, Artificial Sequence; identical to SEQ ID NO: 129
  Probe

SEQ ID NO: 36156 - DNA, 18 bp, Artificial Sequence
  Probe
acagctatccattggtct

SEQ ID NO: 36157 - DNA, 27 bp, Artificial Sequence
  Probe
acagctatccattggtcttaggcccca

SEQ ID NO: 36158 - DNA, 26 bp, Artificial Sequence
  Probe
acatggtctagcggttaggattcctg

SEQ ID NO: 36159 - DNA, 50 bp, Artificial Sequence; identical to SEQ ID NO: 138
  Probe

SEQ ID NO: 36160 - DNA, 33 bp, Artificial Sequence; identical to SEQ ID NO: 2763
  Probe

SEQ ID NO: 36161 - DNA, 34 bp, Artificial Sequence; identical to SEQ ID NO: 12544
  Probe

SEQ ID NO: 36162 - DNA, 35 bp, Artificial Sequence; identical to SEQ ID NO: 149
  Probe

SEQ ID NO: 36163 - DNA, 36 bp, Artificial Sequence; identical to SEQ ID NO: 150
  Probe

SEQ ID NO: 36164 - DNA, 33 bp, Artificial Sequence; identical to SEQ ID NO: 12549
  Probe

SEQ ID NO: 36165 - DNA, 34 bp, Artificial Sequence; identical to SEQ ID NO: 15598
  Probe

SEQ ID NO: 36166 - DNA, 35 bp, Artificial Sequence; identical to SEQ ID NO: 15599
  Probe

SEQ ID NO: 36167 - DNA, 33 bp, Artificial Sequence; identical to SEQ ID NO: 12557
  Probe

SEQ ID NO: 36168 - DNA, 34 bp, Artificial Sequence; identical to SEQ ID NO: 15659
  Probe

SEQ ID NO: 36169 - DNA, 35 bp, Artificial Sequence; identical to SEQ ID NO: 12558
  Probe

SEQ ID NO: 36170 - DNA, 30 bp, Artificial Sequence; identical to SEQ ID NO: 165
  Probe

SEQ ID NO: 36171 - DNA, 27 bp, Artificial Sequence
  Probe
accggggttcaattccccgacggggag

SEQ ID NO: 36172 - DNA, 20 bp, Artificial Sequence
  Probe
accggggttcgattccccga

SEQ ID NO: 36173 - DNA, 24 bp, Artificial Sequence
  Probe
accggggttcgattccccgacggg

SEQ ID NO: 36174 - DNA, 25 bp, Artificial Sequence
  Probe
accggggttcgattccccgacgggg

SEQ ID NO: 36175 - DNA, 27 bp, Artificial Sequence
  Probe
accggggttcgattccccgacggggag

SEQ ID NO: 36176 - DNA, 17 bp, Artificial Sequence
  Probe
acctcctcaaagcaata

SEQ ID NO: 36177 - DNA, 22 bp, Artificial Sequence
  Probe
acctcctcaaagcaatacactg

SEQ ID NO: 36178 - DNA, 23 bp, Artificial Sequence
  Probe
acctcctcaaagcaatacactga

SEQ ID NO: 36179 - DNA, 17 bp, Artificial Sequence
  Probe
acgcagaaggtcctggg

SEQ ID NO: 36180 - DNA, 34 bp, Artificial Sequence; identical to SEQ ID NO: 12574
  Probe

SEQ ID NO: 36181 - DNA, 35 bp, Artificial Sequence; identical to SEQ ID NO: 12575
  Probe

SEQ ID NO: 36182 - DNA, 36 bp, Artificial Sequence; identical to SEQ ID NO: 2844
  Probe

SEQ ID NO: 36183 - DNA, 37 bp, Artificial Sequence; identical to SEQ ID NO: 166
  Probe

SEQ ID NO: 36184 - DNA, 18 bp, Artificial Sequence
  Probe
acgcgaaaggtccccggt

SEQ ID NO: 36185 - DNA, 18 bp, Artificial Sequence
  Probe
acgcgggagaccggggtt

SEQ ID NO: 36186 - DNA, 29 bp, Artificial Sequence
  Probe
acgcgggagaccggggttcaattccccga

SEQ ID NO: 36187 - DNA, 32 bp, Artificial Sequence; identical to SEQ ID NO: 177
  Probe

SEQ ID NO: 36188 - DNA, 33 bp, Artificial Sequence; identical to SEQ ID NO: 178
  Probe

SEQ ID NO: 36189 - DNA, 34 bp, Artificial Sequence; identical to SEQ ID NO: 179
  Probe

SEQ ID NO: 36190 - DNA, 35 bp, Artificial Sequence; identical to SEQ ID NO: 12593
  Probe

SEQ ID NO: 36191 - DNA, 36 bp, Artificial Sequence; identical to SEQ ID NO: 180
  Probe

SEQ ID NO: 36192 - DNA, 20 bp, Artificial Sequence
  Probe
acgcgggagaccggggttcg

SEQ ID NO: 36193 - DNA, 23 bp, Artificial Sequence
  Probe
acgcgggagaccggggttcgatt

SEQ ID NO: 36194 - DNA, 24 bp, Artificial Sequence
  Probe
acgcgggagaccggggttcgattc

SEQ ID NO: 36195 - DNA, 27 bp, Artificial Sequence
  Probe
acgcgggagaccggggttcgattcccc

SEQ ID NO: 36196 - DNA, 28 bp, Artificial Sequence
  Probe
acgcgggagaccggggttcgattcccca

SEQ ID NO: 36197 - DNA, 34 bp, Artificial Sequence
  Probe
acgcgggagaccggggttcgattccccaacgggg

SEQ ID NO: 36198 - DNA, 28 bp, Artificial Sequence
  Probe
acgcgggagaccggggttcgattccccg

SEQ ID NO: 36199 - DNA, 29 bp, Artificial Sequence
  Probe
acgcgggagaccggggttcgattccccga

SEQ ID NO: 36200 - DNA, 30 bp, Artificial Sequence; identical to SEQ ID NO: 182
  Probe

SEQ ID NO: 36201 - DNA, 31 bp, Artificial Sequence; identical to SEQ ID NO: 183
  Probe

SEQ ID NO: 36202 - DNA, 32 bp, Artificial Sequence; identical to SEQ ID NO: 184
  Probe

SEQ ID NO: 36203 - DNA, 33 bp, Artificial Sequence; identical to SEQ ID NO: 185
  Probe

SEQ ID NO: 36204 - DNA, 34 bp, Artificial Sequence; identical to SEQ ID NO: 186
  Probe

SEQ ID NO: 36205 - DNA, 35 bp, Artificial Sequence; identical to SEQ ID NO: 187
  Probe

SEQ ID NO: 36206 - DNA, 36 bp, Artificial Sequence; identical to SEQ ID NO: 188
  Probe

SEQ ID NO: 36207 - DNA, 18 bp, Artificial Sequence
  Probe
acgcgggaggcccgggtt

SEQ ID NO: 36208 - DNA, 20 bp, Artificial Sequence
  Probe
acgcgggaggcccgggttcg

SEQ ID NO: 36209 - DNA, 34 bp, Artificial Sequence; identical to SEQ ID NO: 15849
  Probe

SEQ ID NO: 36210 - DNA, 35 bp, Artificial Sequence; identical to SEQ ID NO: 15850
  Probe

SEQ ID NO: 36211 - DNA, 33 bp, Artificial Sequence; identical to SEQ ID NO: 12608
  Probe

SEQ ID NO: 36212 - DNA, 34 bp, Artificial Sequence; identical to SEQ ID NO: 2884
  Probe

SEQ ID NO: 36213 - DNA, 35 bp, Artificial Sequence; identical to SEQ ID NO: 15863
  Probe

SEQ ID NO: 36214 - DNA, 35 bp, Artificial Sequence; identical to SEQ ID NO: 193
  Probe

SEQ ID NO: 36215 - DNA, 23 bp, Artificial Sequence
  Probe
actacggatcagaagattccagg

SEQ ID NO: 36216 - DNA, 21 bp, Artificial Sequence
  Probe
actccagatcagaaggttgcg

SEQ ID NO: 36217 - DNA, 23 bp, Artificial Sequence
  Probe
actccagatcagaaggttgcgtg

SEQ ID NO: 36218 - DNA, 26 bp, Artificial Sequence
  Probe
actcgaaatccaatgggggttccccg

SEQ ID NO: 36219 - DNA, 20 bp, Artificial Sequence
  Probe
actctgaatccagcgatccg

SEQ ID NO: 36220 - DNA, 21 bp, Artificial Sequence
  Probe
actctgaatccagcgatccga

SEQ ID NO: 36221 - DNA, 22 bp, Artificial Sequence
  Probe
actctgaatccagcgatccgag

SEQ ID NO: 36222 - DNA, 41 bp, Artificial Sequence
  Probe
actctgaatccagcgatccgagttcaaatctcggtggaacc

SEQ ID NO: 36223 - DNA, 41 bp, Artificial Sequence
  Probe
actctgaatccagcgatccgagttcaagtctcggtggaacc

SEQ ID NO: 36224 - DNA, 32 bp, Artificial Sequence; identical to SEQ ID NO: 195
  Probe

SEQ ID NO: 36225 - DNA, 34 bp, Artificial Sequence; identical to SEQ ID NO: 197
  Probe

SEQ ID NO: 36226 - DNA, 50 bp, Artificial Sequence; identical to SEQ ID NO: 199
  Probe

SEQ ID NO: 36227 - DNA, 22 bp, Artificial Sequence
  Probe
actgcagatcaagaagtccccg

SEQ ID NO: 36228 - DNA, 23 bp, Artificial Sequence
  Probe
actgcagatcaagaggtccccgg

SEQ ID NO: 36229 - DNA, 24 bp, Artificial Sequence
  Probe
actgcagatcaagaggtccccggt

SEQ ID NO: 36230 - DNA, 20 bp, Artificial Sequence
  Probe
actttgaatccagcaatccg

SEQ ID NO: 36231 - DNA, 22 bp, Artificial Sequence
  Probe
actttgaatccagcaatccgag

SEQ ID NO: 36232 - DNA, 20 bp, Artificial Sequence
  Probe
actttgaatccagcgatccg

SEQ ID NO: 36233 - DNA, 21 bp, Artificial Sequence
  Probe
actttgaatccagcgatccga

SEQ ID NO: 36234 - DNA, 22 bp, Artificial Sequence
  Probe
actttgaatccagcgatccgag

SEQ ID NO: 36235 - DNA, 30 bp, Artificial Sequence; identical to SEQ ID NO: 209
  Probe

SEQ ID NO: 36236 - DNA, 50 bp, Artificial Sequence; identical to SEQ ID NO: 3039
  Probe

SEQ ID NO: 36237 - DNA, 18 bp, Artificial Sequence
  Probe
acttttaatctgagggtc

SEQ ID NO: 36238 - DNA, 20 bp, Artificial Sequence
  Probe
acttttaatctgagggtcca

SEQ ID NO: 36239 - DNA, 21 bp, Artificial Sequence
  Probe
acttttaatctgagggtccag

SEQ ID NO: 36240 - DNA, 22 bp, Artificial Sequence
  Probe
acttttaatctgagggtccagg

SEQ ID NO: 36241 - DNA, 23 bp, Artificial Sequence
  Probe
acttttaatctgagggtccaggg

SEQ ID NO: 36242 - DNA, 24 bp, Artificial Sequence
  Probe
acttttaatctgagggtccagggt

SEQ ID NO: 36243 - DNA, 41 bp, Artificial Sequence
  Probe
acttttaatctgagggtccagggttcaagtccctgttcggg

SEQ ID NO: 36244 - DNA, 50 bp, Artificial Sequence; identical to SEQ ID NO: 216
  Probe

SEQ ID NO: 36245 - DNA, 46 bp, Artificial Sequence; identical to SEQ ID NO: 224
  Probe

SEQ ID NO: 36246 - DNA, 33 bp, Artificial Sequence; identical to SEQ ID NO: 231
  Probe

SEQ ID NO: 36247 - DNA, 50 bp, Artificial Sequence; identical to SEQ ID NO: 235
  Probe

SEQ ID NO: 36248 - DNA, 29 bp, Artificial Sequence
  Probe
agaccggggttcaattccccgacggggag

SEQ ID NO: 36249 - DNA, 22 bp, Artificial Sequence
  Probe
agaccggggttcgattccccga

SEQ ID NO: 36250 - DNA, 23 bp, Artificial Sequence
  Probe
agaccggggttcgattccccgac

SEQ ID NO: 36251 - DNA, 27 bp, Artificial Sequence
  Probe
agaccggggttcgattccccgacgggg

SEQ ID NO: 36252 - DNA, 29 bp, Artificial Sequence
  Probe
agaccggggttcgattccccgacggggag

SEQ ID NO: 36253 - DNA, 50 bp, Artificial Sequence; identical to SEQ ID NO: 16294
  Probe

SEQ ID NO: 36254 - DNA, 29 bp, Artificial Sequence
  Probe
agcagagtggcgcagcggaagcgtgctgg

SEQ ID NO: 36255 - DNA, 31 bp, Artificial Sequence; identical to SEQ ID NO: 275
  Probe

SEQ ID NO: 36256 - DNA, 32 bp, Artificial Sequence; identical to SEQ ID NO: 276
  Probe

SEQ ID NO: 36257 - DNA, 33 bp, Artificial Sequence; identical to SEQ ID NO: 277
  Probe

SEQ ID NO: 36258 - DNA, 34 bp, Artificial Sequence; identical to SEQ ID NO: 278
  Probe

SEQ ID NO: 36259 - DNA, 50 bp, Artificial Sequence; identical to SEQ ID NO: 285
  Probe

SEQ ID NO: 36260 - DNA, 29 bp, Artificial Sequence
  Probe
agcgatccgagttcaagtctcggtggaac

SEQ ID NO: 36261 - DNA, 50 bp, Artificial Sequence; identical to SEQ ID NO: 3312
  Probe

SEQ ID NO: 36262 - DNA, 38 bp, Artificial Sequence
  Probe
agcggaagcgtgctgggcccataacccagaggtcgatg

SEQ ID NO: 36263 - DNA, 50 bp, Artificial Sequence; identical to SEQ ID NO: 311
  Probe

SEQ ID NO: 36264 - DNA, 31 bp, Artificial Sequence; identical to SEQ ID NO: 315
  Probe

SEQ ID NO: 36265 - DNA, 29 bp, Artificial Sequence
  Probe
aggattcggcgctctcaccgccgcggccc

SEQ ID NO: 36266 - DNA, 29 bp, Artificial Sequence
  Probe
aggattcggcgctttcaccgccgcggccc

SEQ ID NO: 36267 - DNA, 30 bp, Artificial Sequence; identical to SEQ ID NO: 16667
  Probe

SEQ ID NO: 36268 - DNA, 29 bp, Artificial Sequence
  Probe
aggcggcccgggttcgactcccggtgtgg

SEQ ID NO: 36269 - DNA, 25 bp, Artificial Sequence
  Probe
aggctccagtctcttcgggggcgtg

SEQ ID NO: 36270 - DNA, 27 bp, Artificial Sequence
  Probe
agggatgggttcgattctcatagtcct

SEQ ID NO: 36271 - DNA, 28 bp, Artificial Sequence
  Probe
agggattgtgggttcgagtcccatctgg

SEQ ID NO: 36272 - DNA, 29 bp, Artificial Sequence
  Probe
agggtccagggttcaagtccctgttcagg

SEQ ID NO: 36273 - DNA, 29 bp, Artificial Sequence
  Probe
agggtccagggttcaagtccctgttcggg

SEQ ID NO: 36274 - DNA, 50 bp, Artificial Sequence; identical to SEQ ID NO: 334
  Probe

SEQ ID NO: 36275 - DNA, 24 bp, Artificial Sequence
  Probe
aggtcccgggttcgatccccggca

SEQ ID NO: 36276 - DNA, 29 bp, Artificial Sequence
  Probe
aggtcccgggttcgatccccggcatctcc

SEQ ID NO: 36277 - DNA, 28 bp, Artificial Sequence
  Probe
aggtcgctggttcgattccggctcgaag

SEQ ID NO: 36278 - DNA, 22 bp, Artificial Sequence
  Probe
agtatagtggtgagtgtccccg

SEQ ID NO: 36279 - DNA, 23 bp, Artificial Sequence
  Probe
agtatagtggtgagtgtccccgt

SEQ ID NO: 36280 - DNA, 18 bp, Artificial Sequence
  Probe
agtcggtagagcatcaga

SEQ ID NO: 36281 - DNA, 19 bp, Artificial Sequence
  Probe
agtcggtagagcatcagac

SEQ ID NO: 36282 - DNA, 38 bp, Artificial Sequence
  Probe
agtcggtagagcatgagactcttaatctcagggtcgtg

SEQ ID NO: 36283 - DNA, 18 bp, Artificial Sequence
  Probe
agtcggtagagcatggga

SEQ ID NO: 36284 - DNA, 19 bp, Artificial Sequence
  Probe
agtcggtagagcatgggac

SEQ ID NO: 36285 - DNA, 38 bp, Artificial Sequence; identical to SEQ ID NO: 355
  Probe

SEQ ID NO: 36286 - DNA, 18 bp, Artificial Sequence
  Probe
agtctcttcgggggcgtg

SEQ ID NO: 36287 - DNA, 36 bp, Artificial Sequence; identical to SEQ ID NO: 12756
  Probe

SEQ ID NO: 36288 - DNA, 20 bp, Artificial Sequence
  Probe
agtggggttttgcagtcctt

SEQ ID NO: 36289 - DNA, 21 bp, Artificial Sequence
  Probe
agtggggttttgcagtcctta

SEQ ID NO: 36290 - DNA, 19 bp, Artificial Sequence
  Probe
agtggtctaaggcgccaga

SEQ ID NO: 36291 - DNA, 18 bp, Artificial Sequence
  Probe
agtggttaggattcggcg

SEQ ID NO: 36292 - DNA, 24 bp, Artificial Sequence
  Probe
agtggttaggattcggcgctctca

SEQ ID NO: 36293 - DNA, 31 bp, Artificial Sequence; identical to SEQ ID NO: 16956
  Probe

SEQ ID NO: 36294 - DNA, 36 bp, Artificial Sequence; identical to SEQ ID NO: 361
  Probe

SEQ ID NO: 36295 - DNA, 37 bp, Artificial Sequence; identical to SEQ ID NO: 12778
  Probe

SEQ ID NO: 36296 - DNA, 29 bp, Artificial Sequence
  Probe
agtgtttgtgggtttaagtcccattggtc

SEQ ID NO: 36297 - DNA, 30 bp, Artificial Sequence; identical to SEQ ID NO: 3599
  Probe

SEQ ID NO: 36298 - DNA, 31 bp, Artificial Sequence; identical to SEQ ID NO: 3600
  Probe

SEQ ID NO: 36299 - DNA, 32 bp, Artificial Sequence; identical to SEQ ID NO: 16995
  Probe

SEQ ID NO: 36300 - DNA, 20 bp, Artificial Sequence
  Probe
agttcaaatctcggtgggac

SEQ ID NO: 36301 - DNA, 32 bp, Artificial Sequence; identical to SEQ ID NO: 3614
  Probe

SEQ ID NO: 36302 - DNA, 50 bp, Artificial Sequence; identical to SEQ ID NO: 365
  Probe

SEQ ID NO: 36303 - DNA, 28 bp, Artificial Sequence
  Probe
atatcattggtcgtggttgtagtccgtg

SEQ ID NO: 36304 - DNA, 34 bp, Artificial Sequence; identical to SEQ ID NO: 374
  Probe

SEQ ID NO: 36305 - DNA, 36 bp, Artificial Sequence; identical to SEQ ID NO: 17155
  Probe

SEQ ID NO: 36306 - DNA, 34 bp, Artificial Sequence; identical to SEQ ID NO: 375
  Probe

SEQ ID NO: 36307 - DNA, 36 bp, Artificial Sequence; identical to SEQ ID NO: 12805
  Probe

SEQ ID NO: 36308 - DNA, 36 bp, Artificial Sequence; identical to SEQ ID NO: 17166
  Probe

SEQ ID NO: 36309 - DNA, 24 bp, Artificial Sequence
  Probe
atccaatggggtttccccgcacag

SEQ ID NO: 36310 - DNA, 21 bp, Artificial Sequence
  Probe
atccattggggtctccccgcg

SEQ ID NO: 36311 - DNA, 21 bp, Artificial Sequence
  Probe
atccattggggtttccccgcg

SEQ ID NO: 36312 - DNA, 23 bp, Artificial Sequence
  Probe
atccattggggtttccccgcgca

SEQ ID NO: 36313 - DNA, 24 bp, Artificial Sequence
  Probe
atccattggggtttccccgcgcag

SEQ ID NO: 36314 - DNA, 19 bp, Artificial Sequence
  Probe
atccccggcacctccacca

SEQ ID NO: 36315 - DNA, 18 bp, Artificial Sequence
  Probe
atcgatgcccgcatcctc

SEQ ID NO: 36316 - DNA, 19 bp, Artificial Sequence
  Probe
atcgatgcccgcatcctcc

SEQ ID NO: 36317 - DNA, 33 bp, Artificial Sequence; identical to SEQ ID NO: 387
  Probe

SEQ ID NO: 36318 - DNA, 20 bp, Artificial Sequence
  Probe
atctaaaggtccctggttcg

SEQ ID NO: 36319 - DNA, 34 bp, Artificial Sequence
  Probe
atctaaaggtccctggttcgatcccgggtttcgg

SEQ ID NO: 36320 - DNA, 34 bp, Artificial Sequence; identical to SEQ ID NO: 17371
  Probe

SEQ ID NO: 36321 - DNA, 30 bp, Artificial Sequence; identical to SEQ ID NO: 12823
  Probe

SEQ ID NO: 36322 - DNA, 27 bp, Artificial Sequence
  Probe
atgggtggttcagtggtagaattctcg

SEQ ID NO: 36323 - DNA, 19 bp, Artificial Sequence
  Probe
atggtctagcggttaggat

SEQ ID NO: 36324 - DNA, 20 bp, Artificial Sequence
  Probe
atggtctagcggttaggatt

SEQ ID NO: 36325 - DNA, 22 bp, Artificial Sequence
  Probe
atggtctagcggttaggattcc

SEQ ID NO: 36326 - DNA, 23 bp, Artificial Sequence
  Probe
atggtctagcggttaggattcct

SEQ ID NO: 36327 - DNA, 24 bp, Artificial Sequence
  Probe
atggtctagcggttaggattcctg

SEQ ID NO: 36328 - DNA, 50 bp, Artificial Sequence
  Probe
atggttagcactctggactctgaatccagcgatccgagttcaaatctcgg

SEQ ID NO: 36329 - DNA, 20 bp, Artificial Sequence
  Probe
attcccattcttgcgacccg

SEQ ID NO: 36330 - DNA, 21 bp, Artificial Sequence
  Probe
attcccattcttgcgacccgg

SEQ ID NO: 36331 - DNA, 23 bp, Artificial Sequence
  Probe
attccggatcagaagattgaggg

SEQ ID NO: 36332 - DNA, 24 bp, Artificial Sequence
  Probe
attccggatcagaagattgagggt

SEQ ID NO: 36333 - DNA, 25 bp, Artificial Sequence
  Probe
attccggatcagaagattgagggtt

SEQ ID NO: 36334 - DNA, 50 bp, Artificial Sequence; identical to SEQ ID NO: 3882
  Probe

SEQ ID NO: 36335 - DNA, 23 bp, Artificial Sequence
  Probe
attggtcgtggttgtagtccgtg

SEQ ID NO: 36336 - DNA, 27 bp, Artificial Sequence
  Probe
attggtcgtggttgtagtccgtgcgag

SEQ ID NO: 36337 - DNA, 29 bp, Artificial Sequence
  Probe
attggtcgtggttgtagtccgtgcgagaa

SEQ ID NO: 36338 - DNA, 30 bp, Artificial Sequence; identical to SEQ ID NO: 9429
  Probe

SEQ ID NO: 36339 - DNA, 31 bp, Artificial Sequence; identical to SEQ ID NO: 426
  Probe

SEQ ID NO: 36340 - DNA, 29 bp, Artificial Sequence
  Probe
atttaggctccagtctcttcgggggcgtg

SEQ ID NO: 36341 - DNA, 50 bp, Artificial Sequence; identical to SEQ ID NO: 437
  Probe

SEQ ID NO: 36342 - DNA, 50 bp, Artificial Sequence; identical to SEQ ID NO: 442
  Probe

SEQ ID NO: 36343 - DNA, 50 bp, Artificial Sequence; identical to SEQ ID NO: 447
  Probe

SEQ ID NO: 36344 - DNA, 30 bp, Artificial Sequence
  Probe
caagcagttaacgcgggttcgattcccggg

SEQ ID NO: 36345 - DNA, 18 bp, Artificial Sequence
  Probe
caagcagttgacccgggt

SEQ ID NO: 36346 - DNA, 36 bp, Artificial Sequence
  Probe
caagcagttgacccgggttcgattcccggccaacgc

SEQ ID NO: 36347 - DNA, 21 bp, Artificial Sequence
  Probe
caatccccggcacctccacca

SEQ ID NO: 36348 - DNA, 21 bp, Artificial Sequence
  Probe
caatggggtttccccgcacag

SEQ ID NO: 36349 - DNA, 50 bp, Artificial Sequence; identical to SEQ ID NO: 462
  Probe

SEQ ID NO: 36350 - DNA, 21 bp, Artificial Sequence
  Probe
cacaagaactgctaactcatg

SEQ ID NO: 36351 - DNA, 50 bp, Artificial Sequence; identical to SEQ ID NO: 466
  Probe

SEQ ID NO: 36352 - DNA, 19 bp, Artificial Sequence
  Probe
cacacgcgaaaggtccccg

SEQ ID NO: 36353 - DNA, 20 bp, Artificial Sequence
  Probe
cacacgcgaaaggtccccgg

SEQ ID NO: 36354 - DNA, 21 bp, Artificial Sequence
  Probe
cacacgcgaaaggtccccggt

SEQ ID NO: 36355 - DNA, 18 bp, Artificial Sequence
  Probe
cacgcagaaggtcctggg

SEQ ID NO: 36356 - DNA, 36 bp, Artificial Sequence; identical to SEQ ID NO: 29340
  Probe

SEQ ID NO: 36357 - DNA, 37 bp, Artificial Sequence
  Probe
cacgcagaaggtcctgggttcgagccccagtggaacc

SEQ ID NO: 36358 - DNA, 18 bp, Artificial Sequence
  Probe
cacgcgaaaggtccccgg

SEQ ID NO: 36359 - DNA, 19 bp, Artificial Sequence
  Probe
cacgcgaaaggtccccggt

SEQ ID NO: 36360 - DNA, 34 bp, Artificial Sequence; identical to SEQ ID NO: 4128
  Probe

SEQ ID NO: 36361 - DNA, 35 bp, Artificial Sequence; identical to SEQ ID NO: 17774
  Probe

SEQ ID NO: 36362 - DNA, 37 bp, Artificial Sequence; identical to SEQ ID NO: 478
  Probe

SEQ ID NO: 36363 - DNA, 30 bp, Artificial Sequence; identical to SEQ ID NO: 479
  Probe

SEQ ID NO: 36364 - DNA, 31 bp, Artificial Sequence; identical to SEQ ID NO: 480
  Probe

SEQ ID NO: 36365 - DNA, 34 bp, Artificial Sequence; identical to SEQ ID NO: 483
  Probe

SEQ ID NO: 36366 - DNA, 35 bp, Artificial Sequence; identical to SEQ ID NO: 484
  Probe

SEQ ID NO: 36367 - DNA, 36 bp, Artificial Sequence; identical to SEQ ID NO: 485
  Probe

SEQ ID NO: 36368 - DNA, 37 bp, Artificial Sequence; identical to SEQ ID NO: 486
  Probe

SEQ ID NO: 36369 - DNA, 35 bp, Artificial Sequence
  Probe
cacgcgggaggcccgggttcgattcccggcccatg

SEQ ID NO: 36370 - DNA, 28 bp, Artificial Sequence
  Probe
cactgtaaagctaacttagcattaacct

SEQ ID NO: 36371 - DNA, 29 bp, Artificial Sequence
  Probe
cactgtaaagctaacttagcattaacctt

SEQ ID NO: 36372 - DNA, 18 bp, Artificial Sequence
  Probe
cagaagattctaggttcg

SEQ ID NO: 36373 - DNA, 31 bp, Artificial Sequence; identical to SEQ ID NO: 17836
  Probe

SEQ ID NO: 36374 - DNA, 32 bp, Artificial Sequence; identical to SEQ ID NO: 17837
  Probe

SEQ ID NO: 36375 - DNA, 33 bp, Artificial Sequence
  Probe
cagaaggtcctgggttcgagccccagtggaacc

SEQ ID NO: 36376 - DNA, 34 bp, Artificial Sequence; identical to SEQ ID NO: 17838
  Probe

SEQ ID NO: 36377 - DNA, 50 bp, Artificial Sequence; identical to SEQ ID NO: 514
  Probe

SEQ ID NO: 36378 - DNA, 29 bp, Artificial Sequence
  Probe
cagagaatagtttaaattagaatcttagc

SEQ ID NO: 36379 - DNA, 33 bp, Artificial Sequence; identical to SEQ ID NO: 522
  Probe

SEQ ID NO: 36380 - DNA, 50 bp, Artificial Sequence; identical to SEQ ID NO: 526
  Probe

SEQ ID NO: 36381 - DNA, 30 bp, Artificial Sequence; identical to SEQ ID NO: 9562
  Probe

SEQ ID NO: 36382 - DNA, 31 bp, Artificial Sequence; identical to SEQ ID NO: 12889
  Probe

SEQ ID NO: 36383 - DNA, 32 bp, Artificial Sequence; identical to SEQ ID NO: 17977
  Probe

SEQ ID NO: 36384 - DNA, 28 bp, Artificial Sequence
  Probe
cagggatgggttcgattctcatagtcct

SEQ ID NO: 36385 - DNA, 17 bp, Artificial Sequence
  Probe
cagtcggtagagcatca

SEQ ID NO: 36386 - DNA, 18 bp, Artificial Sequence
  Probe
cagtcggtagagcatcag

SEQ ID NO: 36387 - DNA, 32 bp, Artificial Sequence; identical to SEQ ID NO: 18036
  Probe

SEQ ID NO: 36388 - DNA, 18 bp, Artificial Sequence
  Probe
cataacccagaggtcgat

SEQ ID NO: 36389 - DNA, 19 bp, Artificial Sequence
  Probe
cataacccagaggtcgatg

SEQ ID NO: 36390 - DNA, 20 bp, Artificial Sequence
  Probe
cataacccagaggtcgatgg

SEQ ID NO: 36391 - DNA, 18 bp, Artificial Sequence
  Probe
cataatctgaaggtcgtg

SEQ ID NO: 36392 - DNA, 20 bp, Artificial Sequence
  Probe
cataatctgaaggtcgtgag

SEQ ID NO: 36393 - DNA, 24 bp, Artificial Sequence
  Probe
catagtgtagcggttatcacgtct

SEQ ID NO: 36394 - DNA, 24 bp, Artificial Sequence
  Probe
catagtgtagtggttatcacgtct

SEQ ID NO: 36395 - DNA, 26 bp, Artificial Sequence
  Probe
catatggtctagcggttaggattcct

SEQ ID NO: 36396 - DNA, 28 bp, Artificial Sequence
  Probe
catgggtggttcagtggtagaattctcg

SEQ ID NO: 36397 - DNA, 20 bp, Artificial Sequence
  Probe
catggtctagcggttaggat

SEQ ID NO: 36398 - DNA, 21 bp, Artificial Sequence
  Probe
catggtctagcggttaggatt

SEQ ID NO: 36399 - DNA, 23 bp, Artificial Sequence
  Probe
catggtctagcggttaggattcc

SEQ ID NO: 36400 - DNA, 24 bp, Artificial Sequence
  Probe
catggtctagcggttaggattcct

SEQ ID NO: 36401 - DNA, 25 bp, Artificial Sequence
  Probe
catggtctagcggttaggattcctg

SEQ ID NO: 36402 - DNA, 18 bp, Artificial Sequence
  Probe
cattggggtctccccgcg

SEQ ID NO: 36403 - DNA, 18 bp, Artificial Sequence
  Probe
cattggggtttccccgcg

SEQ ID NO: 36404 - DNA, 20 bp, Artificial Sequence
  Probe
cattggggtttccccgcgca

SEQ ID NO: 36405 - DNA, 21 bp, Artificial Sequence
  Probe
cattggggtttccccgcgcag

SEQ ID NO: 36406 - DNA, 23 bp, Artificial Sequence
  Probe
cattggggtttccccgcgcaggt

SEQ ID NO: 36407 - DNA, 46 bp, Artificial Sequence; identical to SEQ ID NO: 558
  Probe

SEQ ID NO: 36408 - DNA, 27 bp, Artificial Sequence
  Probe
ccacatggtctagcggttaggattcct

SEQ ID NO: 36409 - DNA, 18 bp, Artificial Sequence
  Probe
ccacgcgggagacccggg

SEQ ID NO: 36410 - DNA, 18 bp, Artificial Sequence
  Probe
ccacgcgggaggcccggg

SEQ ID NO: 36411 - DNA, 19 bp, Artificial Sequence
  Probe
ccacgcgggaggcccgggt

SEQ ID NO: 36412 - DNA, 21 bp, Artificial Sequence
  Probe
ccacgcgggaggcccgggttc

SEQ ID NO: 36413 - DNA, 22 bp, Artificial Sequence
  Probe
ccacgcgggaggcccgggttcg

SEQ ID NO: 36414 - DNA, 36 bp, Artificial Sequence; identical to SEQ ID NO: 29824
  Probe

SEQ ID NO: 36415 - DNA, 35 bp, Artificial Sequence
  Probe
ccacgcgggaggcccgggttcgattcccggcccat

SEQ ID NO: 36416 - DNA, 36 bp, Artificial Sequence; identical to SEQ ID NO: 29831
  Probe

SEQ ID NO: 36417 - DNA, 37 bp, Artificial Sequence
  Probe
ccacgcgggaggcccgggttcgattcccggcccatgc

SEQ ID NO: 36418 - DNA, 31 bp, Artificial Sequence; identical to SEQ ID NO: 4561
  Probe

SEQ ID NO: 36419 - DNA, 32 bp, Artificial Sequence
  Probe
ccaggcggcccgggttcgactcccggtgtggg

SEQ ID NO: 36420 - DNA, 33 bp, Artificial Sequence; identical to SEQ ID NO: 18272
  Probe

SEQ ID NO: 36421 - DNA, 34 bp, Artificial Sequence; identical to SEQ ID NO: 4562
  Probe

SEQ ID NO: 36422 - DNA, 31 bp, Artificial Sequence; identical to SEQ ID NO: 18284
  Probe

SEQ ID NO: 36423 - DNA, 33 bp, Artificial Sequence; identical to SEQ ID NO: 12926
  Probe

SEQ ID NO: 36424 - DNA, 18 bp, Artificial Sequence
  Probe
ccataacccagaggtcga

SEQ ID NO: 36425 - DNA, 19 bp, Artificial Sequence
  Probe
ccataacccagaggtcgat

SEQ ID NO: 36426 - DNA, 20 bp, Artificial Sequence
  Probe
ccataacccagaggtcgatg

SEQ ID NO: 36427 - DNA, 21 bp, Artificial Sequence
  Probe
ccataacccagaggtcgatgg

SEQ ID NO: 36428 - DNA, 25 bp, Artificial Sequence
  Probe
ccatagtgtagcggttatcacgtct

SEQ ID NO: 36429 - DNA, 25 bp, Artificial Sequence
  Probe
ccatagtgtagtggttatcacgtct

SEQ ID NO: 36430 - DNA, 26 bp, Artificial Sequence
  Probe
ccatagtgtagtggttatcacgtctg

SEQ ID NO: 36431 - DNA, 27 bp, Artificial Sequence
  Probe
ccatatggtctagcggttaggattcct

SEQ ID NO: 36432 - DNA, 28 bp, Artificial Sequence
  Probe
ccatatggtctagcggttaggattcctg

SEQ ID NO: 36433 - DNA, 18 bp, Artificial Sequence
  Probe
ccattcttgcgacccggg

SEQ ID NO: 36434 - DNA, 27 bp, Artificial Sequence
  Probe
cccacatggtctagcggttaggattcc

SEQ ID NO: 36435 - DNA, 28 bp, Artificial Sequence
  Probe
cccacatggtctagcggttaggattcct

SEQ ID NO: 36436 - DNA, 29 bp, Artificial Sequence
  Probe
cccacatggtctagcggttaggattcctg

SEQ ID NO: 36437 - DNA, 30 bp, Artificial Sequence; identical to SEQ ID NO: 9679
  Probe

SEQ ID NO: 36438 - DNA, 32 bp, Artificial Sequence; identical to SEQ ID NO: 585
  Probe

SEQ ID NO: 36439 - DNA, 33 bp, Artificial Sequence; identical to SEQ ID NO: 12940
  Probe

SEQ ID NO: 36440 - DNA, 34 bp, Artificial Sequence; identical to SEQ ID NO: 18397
  Probe

SEQ ID NO: 36441 - DNA, 35 bp, Artificial Sequence; identical to SEQ ID NO: 18398
  Probe

SEQ ID NO: 36442 - DNA, 32 bp, Artificial Sequence; identical to SEQ ID NO: 12942
  Probe

SEQ ID NO: 36443 - DNA, 34 bp, Artificial Sequence
  Probe
cccaggtggcccgggttcgactcccggtatggga

SEQ ID NO: 36444 - DNA, 35 bp, Artificial Sequence
  Probe
cccaggtggcccgggttcgactcccggtatgggaa

SEQ ID NO: 36445 - DNA, 18 bp, Artificial Sequence
  Probe
cccataacccagaggtcg

SEQ ID NO: 36446 - DNA, 19 bp, Artificial Sequence
  Probe
cccataacccagaggtcga

SEQ ID NO: 36447 - DNA, 20 bp, Artificial Sequence
  Probe
cccataacccagaggtcgat

SEQ ID NO: 36448 - DNA, 21 bp, Artificial Sequence
  Probe
cccataacccagaggtcgatg

SEQ ID NO: 36449 - DNA, 22 bp, Artificial Sequence
  Probe
cccataacccagaggtcgatgg

SEQ ID NO: 36450 - DNA, 41 bp, Artificial Sequence
  Probe
cccataacccagaggtcgatggatcgaaaccatcctctgct

SEQ ID NO: 36451 - DNA, 28 bp, Artificial Sequence
  Probe
cccatatggtctagcggttaggattcct

SEQ ID NO: 36452 - DNA, 29 bp, Artificial Sequence
  Probe
cccatatggtctagcggttaggattcctg

SEQ ID NO: 36453 - DNA, 30 bp, Artificial Sequence; identical to SEQ ID NO: 9682
  Probe

SEQ ID NO: 36454 - DNA, 26 bp, Artificial Sequence
  Probe
cccatggtgtaatggttagcactctg

SEQ ID NO: 36455 - DNA, 34 bp, Artificial Sequence; identical to SEQ ID NO: 604
  Probe

SEQ ID NO: 36456 - DNA, 29 bp, Artificial Sequence
  Probe
cccggatagctcagtcggtagagcatcag

SEQ ID NO: 36457 - DNA, 30 bp, Artificial Sequence; identical to SEQ ID NO: 615
  Probe

SEQ ID NO: 36458 - DNA, 31 bp, Artificial Sequence; identical to SEQ ID NO: 616
  Probe

SEQ ID NO: 36459 - DNA, 33 bp, Artificial Sequence; identical to SEQ ID NO: 618
  Probe

SEQ ID NO: 36460 - DNA, 35 bp, Artificial Sequence; identical to SEQ ID NO: 620
  Probe

SEQ ID NO: 36461 - DNA, 36 bp, Artificial Sequence; identical to SEQ ID NO: 12964
  Probe

SEQ ID NO: 36462 - DNA, 28 bp, Artificial Sequence
  Probe
cccggctagctcagtcggtagagcatga

SEQ ID NO: 36463 - DNA, 29 bp, Artificial Sequence
  Probe
cccggctagctcagtcggtagagcatgag

SEQ ID NO: 36464 - DNA, 30 bp, Artificial Sequence; identical to SEQ ID NO: 4748
  Probe

SEQ ID NO: 36465 - DNA, 28 bp, Artificial Sequence
  Probe
cccggctagctcagtcggtagagcatgg

SEQ ID NO: 36466 - DNA, 30 bp, Artificial Sequence; identical to SEQ ID NO: 4750
  Probe

SEQ ID NO: 36467 - DNA, 25 bp, Artificial Sequence
  Probe
cccgggttcgatccccagcatctcc

SEQ ID NO: 36468 - DNA, 22 bp, Artificial Sequence
  Probe
cccggtaatcgcataaaactta

SEQ ID NO: 36469 - DNA, 29 bp, Artificial Sequence
  Probe
cccggtaatcgcataaaacttaaaacttt

SEQ ID NO: 36470 - DNA, 30 bp, Artificial Sequence
  Probe
cccggtaatcgcataaaacttaaaacttta

SEQ ID NO: 36471 - DNA, 30 bp, Artificial Sequence; identical to SEQ ID NO: 12985
  Probe

SEQ ID NO: 36472 - DNA, 30 bp, Artificial Sequence; identical to SEQ ID NO: 637
  Probe

SEQ ID NO: 36473 - DNA, 32 bp, Artificial Sequence; identical to SEQ ID NO: 639
  Probe

SEQ ID NO: 36474 - DNA, 33 bp, Artificial Sequence; identical to SEQ ID NO: 640
  Probe

SEQ ID NO: 36475 - DNA, 34 bp, Artificial Sequence; identical to SEQ ID NO: 641
  Probe

SEQ ID NO: 36476 - DNA, 50 bp, Artificial Sequence; identical to SEQ ID NO: 4772
  Probe

SEQ ID NO: 36477 - DNA, 35 bp, Artificial Sequence; identical to SEQ ID NO: 646
  Probe

SEQ ID NO: 36478 - DNA, 26 bp, Artificial Sequence
  Probe
ccgagtggtctaaggcgccagactca

SEQ ID NO: 36479 - DNA, 18 bp, Artificial Sequence
  Probe
ccgcagcaacctcggttc

SEQ ID NO: 36480 - DNA, 33 bp, Artificial Sequence; identical to SEQ ID NO: 4791
  Probe

SEQ ID NO: 36481 - DNA, 32 bp, Artificial Sequence; identical to SEQ ID NO: 13005
  Probe

SEQ ID NO: 36482 - DNA, 33 bp, Artificial Sequence; identical to SEQ ID NO: 13006
  Probe

SEQ ID NO: 36483 - DNA, 34 bp, Artificial Sequence; identical to SEQ ID NO: 13007
  Probe

SEQ ID NO: 36484 - DNA, 35 bp, Artificial Sequence; identical to SEQ ID NO: 13008
  Probe

SEQ ID NO: 36485 - DNA, 26 bp, Artificial Sequence
  Probe
ccgcctgtcacgcgggagaccggggt

SEQ ID NO: 36486 - DNA, 29 bp, Artificial Sequence
  Probe
ccgcggcccgggttcgattcccggtcagg

SEQ ID NO: 36487 - DNA, 30 bp, Artificial Sequence; identical to SEQ ID NO: 18662
  Probe

SEQ ID NO: 36488 - DNA, 31 bp, Artificial Sequence; identical to SEQ ID NO: 4807
  Probe

SEQ ID NO: 36489 - DNA, 25 bp, Artificial Sequence
  Probe
ccgctggtgtagtggtatcatgcaa

SEQ ID NO: 36490 - DNA, 28 bp, Artificial Sequence
  Probe
ccggatagctcagtcggtagagcatcag

SEQ ID NO: 36491 - DNA, 29 bp, Artificial Sequence
  Probe
ccggatagctcagtcggtagagcatcaga

SEQ ID NO: 36492 - DNA, 30 bp, Artificial Sequence; identical to SEQ ID NO: 668
  Probe

SEQ ID NO: 36493 - DNA, 34 bp, Artificial Sequence; identical to SEQ ID NO: 672
  Probe

SEQ ID NO: 36494 - DNA, 28 bp, Artificial Sequence
  Probe
ccggctagctcagtcggtagagcatgag

SEQ ID NO: 36495 - DNA, 29 bp, Artificial Sequence
  Probe
ccggctagctcagtcggtagagcatgaga

SEQ ID NO: 36496 - DNA, 30 bp, Artificial Sequence; identical to SEQ ID NO: 675
  Probe

SEQ ID NO: 36497 - DNA, 28 bp, Artificial Sequence
  Probe
ccggctagctcagtcggtagagcatggg

SEQ ID NO: 36498 - DNA, 29 bp, Artificial Sequence
  Probe
ccggctagctcagtcggtagagcatggga

SEQ ID NO: 36499 - DNA, 30 bp, Artificial Sequence; identical to SEQ ID NO: 680
  Probe

SEQ ID NO: 36500 - DNA, 29 bp, Artificial Sequence
  Probe
ccgtgatcgtatagtggttagtactctgc

SEQ ID NO: 36501 - DNA, 19 bp, Artificial Sequence
  Probe
cctcacacgcgaaaggtcc

SEQ ID NO: 36502 - DNA, 20 bp, Artificial Sequence
  Probe
cctcacacgcgaaaggtccc

SEQ ID NO: 36503 - DNA, 21 bp, Artificial Sequence
  Probe
cctcacacgcgaaaggtcccc

SEQ ID NO: 36504 - DNA, 22 bp, Artificial Sequence
  Probe
cctcacacgcgaaaggtccccg

SEQ ID NO: 36505 - DNA, 23 bp, Artificial Sequence
  Probe
cctcacacgcgaaaggtccccgg

SEQ ID NO: 36506 - DNA, 24 bp, Artificial Sequence
  Probe
cctcacacgcgaaaggtccccggt

SEQ ID NO: 36507 - DNA, 18 bp, Artificial Sequence
  Probe
cctcctcaaagcaataca

SEQ ID NO: 36508 - DNA, 21 bp, Artificial Sequence
  Probe
cctcctcaaagcaatacactg

SEQ ID NO: 36509 - DNA, 22 bp, Artificial Sequence
  Probe
cctcctcaaagcaatacactga

SEQ ID NO: 36510 - DNA, 50 bp, Artificial Sequence
  Probe
cctcctcaaagcaatacactgaaaatgtttagacgggctcacatcacccc

SEQ ID NO: 36511 - DNA, 28 bp, Artificial Sequence
  Probe
cctcgttagtatagtggtgagtatcccc

SEQ ID NO: 36512 - DNA, 29 bp, Artificial Sequence
  Probe
cctcgttagtatagtggtgagtatccccg

SEQ ID NO: 36513 - DNA, 30 bp, Artificial Sequence; identical to SEQ ID NO: 18792
  Probe

SEQ ID NO: 36514 - DNA, 21 bp, Artificial Sequence
  Probe
cctgccacgcgggaggcccgg

SEQ ID NO: 36515 - DNA, 23 bp, Artificial Sequence
  Probe
cctgccacgcgggaggcccgggt

SEQ ID NO: 36516 - DNA, 41 bp, Artificial Sequence
  Probe
cctgccacgcgggaggcccgggttcgattcccggcccatgc

SEQ ID NO: 36517 - DNA, 29 bp, Artificial Sequence
  Probe
cctggtggtctagtggttaggattcggcg

SEQ ID NO: 36518 - DNA, 21 bp, Artificial Sequence
  Probe
cctgtcacgcgggagaccggg

SEQ ID NO: 36519 - DNA, 22 bp, Artificial Sequence
  Probe
cctgtcacgcgggagaccgggg

SEQ ID NO: 36520 - DNA, 23 bp, Artificial Sequence
  Probe
cctgtcacgcgggagaccggggt

SEQ ID NO: 36521 - DNA, 24 bp, Artificial Sequence
  Probe
cctgtcacgcgggagaccggggtt

SEQ ID NO: 36522 - DNA, 38 bp, Artificial Sequence; identical to SEQ ID NO: 13078
  Probe

SEQ ID NO: 36523 - DNA, 41 bp, Artificial Sequence
  Probe
cctgtcacgcgggagaccggggttcaattccccgacgggga

SEQ ID NO: 36524 - DNA, 42 bp, Artificial Sequence
  Probe
cctgtcacgcgggagaccggggttcaattccccgacggggag

SEQ ID NO: 36525 - DNA, 26 bp, Artificial Sequence
  Probe
cctgtcacgcgggagaccggggttcg

SEQ ID NO: 36526 - DNA, 35 bp, Artificial Sequence; identical to SEQ ID NO: 13080
  Probe

SEQ ID NO: 36527 - DNA, 36 bp, Artificial Sequence; identical to SEQ ID NO: 18828
  Probe

SEQ ID NO: 36528 - DNA, 38 bp, Artificial Sequence; identical to SEQ ID NO: 13081
  Probe

SEQ ID NO: 36529 - DNA, 41 bp, Artificial Sequence; identical to SEQ ID NO: 18829
  Probe

SEQ ID NO: 36530 - DNA, 42 bp, Artificial Sequence; identical to SEQ ID NO: 706
  Probe

SEQ ID NO: 36531 - DNA, 19 bp, Artificial Sequence
  Probe
ccttccaagcagttgaccc

SEQ ID NO: 36532 - DNA, 20 bp, Artificial Sequence
  Probe
ccttccaagcagttgacccg

SEQ ID NO: 36533 - DNA, 21 bp, Artificial Sequence
  Probe
ccttccaagcagttgacccgg

SEQ ID NO: 36534 - DNA, 22 bp, Artificial Sequence
  Probe
ccttccaagcagttgacccggg

SEQ ID NO: 36535 - DNA, 23 bp, Artificial Sequence
  Probe
ccttccaagcagttgacccgggt

SEQ ID NO: 36536 - DNA, 24 bp, Artificial Sequence
  Probe
ccttccaagcagttgacccgggtt

SEQ ID NO: 36537 - DNA, 41 bp, Artificial Sequence
  Probe
ccttccaagcagttgacccgggttcgattcccggccaacgc

SEQ ID NO: 36538 - DNA, 22 bp, Artificial Sequence
  Probe
cctttcaagcagttaacgcggg

SEQ ID NO: 36539 - DNA, 35 bp, Artificial Sequence
  Probe
cctttcaagcagttaacgcgggttcgattcccggg

SEQ ID NO: 36540 - DNA, 31 bp, Artificial Sequence; identical to SEQ ID NO: 18940
  Probe

SEQ ID NO: 36541 - DNA, 27 bp, Artificial Sequence
  Probe
cgatccgagttcaaatctcggtgggac

SEQ ID NO: 36542 - DNA, 27 bp, Artificial Sequence
  Probe
cgatccgagttcaagtctcggtggaac

SEQ ID NO: 36543 - DNA, 33 bp, Artificial Sequence; identical to SEQ ID NO: 13094
  Probe

SEQ ID NO: 36544 - DNA, 34 bp, Artificial Sequence; identical to SEQ ID NO: 13095
  Probe

SEQ ID NO: 36545 - DNA, 35 bp, Artificial Sequence; identical to SEQ ID NO: 13096
  Probe

SEQ ID NO: 36546 - DNA, 36 bp, Artificial Sequence; identical to SEQ ID NO: 13097
  Probe

SEQ ID NO: 36547 - DNA, 50 bp, Artificial Sequence; identical to SEQ ID NO: 4981
  Probe

SEQ ID NO: 36548 - DNA, 32 bp, Artificial Sequence; identical to SEQ ID NO: 30351
  Probe

SEQ ID NO: 36549 - DNA, 33 bp, Artificial Sequence; identical to SEQ ID NO: 13103
  Probe

SEQ ID NO: 36550 - DNA, 25 bp, Artificial Sequence
  Probe
cgcctgtcacgcgggagaccggggt

SEQ ID NO: 36551 - DNA, 29 bp, Artificial Sequence
  Probe
cgcggcccgggttcgattcccggtcaggg

SEQ ID NO: 36552 - DNA, 30 bp, Artificial Sequence; identical to SEQ ID NO: 19131
  Probe

SEQ ID NO: 36553 - DNA, 32 bp, Artificial Sequence; identical to SEQ ID NO: 727
  Probe

SEQ ID NO: 36554 - DNA, 33 bp, Artificial Sequence; identical to SEQ ID NO: 13132
  Probe

SEQ ID NO: 36555 - DNA, 34 bp, Artificial Sequence; identical to SEQ ID NO: 728
  Probe

SEQ ID NO: 36556 - DNA, 35 bp, Artificial Sequence; identical to SEQ ID NO: 729
  Probe

SEQ ID NO: 36557 - DNA, 28 bp, Artificial Sequence
  Probe
cgcgggagaccggggttcgattccccga

SEQ ID NO: 36558 - DNA, 29 bp, Artificial Sequence
  Probe
cgcgggagaccggggttcgattccccgac

SEQ ID NO: 36559 - DNA, 30 bp, Artificial Sequence; identical to SEQ ID NO: 730
  Probe

SEQ ID NO: 36560 - DNA, 31 bp, Artificial Sequence; identical to SEQ ID NO: 731
  Probe

SEQ ID NO: 36561 - DNA, 32 bp, Artificial Sequence; identical to SEQ ID NO: 732
  Probe

SEQ ID NO: 36562 - DNA, 33 bp, Artificial Sequence; identical to SEQ ID NO: 733
  Probe

SEQ ID NO: 36563 - DNA, 34 bp, Artificial Sequence; identical to SEQ ID NO: 734
  Probe

SEQ ID NO: 36564 - DNA, 35 bp, Artificial Sequence; identical to SEQ ID NO: 735
  Probe

SEQ ID NO: 36565 - DNA, 33 bp, Artificial Sequence; identical to SEQ ID NO: 19171
  Probe

SEQ ID NO: 36566 - DNA, 34 bp, Artificial Sequence; identical to SEQ ID NO: 19172
  Probe

SEQ ID NO: 36567 - DNA, 32 bp, Artificial Sequence; identical to SEQ ID NO: 19183
  Probe

SEQ ID NO: 36568 - DNA, 33 bp, Artificial Sequence; identical to SEQ ID NO: 19184
  Probe

SEQ ID NO: 36569 - DNA, 34 bp, Artificial Sequence; identical to SEQ ID NO: 19185
  Probe

SEQ ID NO: 36570 - DNA, 21 bp, Artificial Sequence
  Probe
cgctctcaccgccgcggcccg

SEQ ID NO: 36571 - DNA, 42 bp, Artificial Sequence; identical to SEQ ID NO: 19192
  Probe

SEQ ID NO: 36572 - DNA, 34 bp, Artificial Sequence; identical to SEQ ID NO: 747
  Probe

SEQ ID NO: 36573 - DNA, 37 bp, Artificial Sequence; identical to SEQ ID NO: 750
  Probe

SEQ ID NO: 36574 - DNA, 20 bp, Artificial Sequence
  Probe
cggagctggggattgtgggt

SEQ ID NO: 36575 - DNA, 28 bp, Artificial Sequence
  Probe
cggatagctcagtcggtagagcatcaga

SEQ ID NO: 36576 - DNA, 33 bp, Artificial Sequence; identical to SEQ ID NO: 765
  Probe

SEQ ID NO: 36577 - DNA, 18 bp, Artificial Sequence
  Probe
cggatcagaagattccag

SEQ ID NO: 36578 - DNA, 19 bp, Artificial Sequence
  Probe
cggatcagaagattccagg

SEQ ID NO: 36579 - DNA, 20 bp, Artificial Sequence
  Probe
cggatcagaagattccaggt

SEQ ID NO: 36580 - DNA, 19 bp, Artificial Sequence
  Probe
cggatcagaagattgaggg

SEQ ID NO: 36581 - DNA, 20 bp, Artificial Sequence
  Probe
cggatcagaagattgagggt

SEQ ID NO: 36582 - DNA, 19 bp, Artificial Sequence
  Probe
cggatcagaagattgcagg

SEQ ID NO: 36583 - DNA, 25 bp, Artificial Sequence
  Probe
cggcccgggttcgactcccggtgtg

SEQ ID NO: 36584 - DNA, 28 bp, Artificial Sequence
  Probe
cggcccgggttcgactcccggtgtggga

SEQ ID NO: 36585 - DNA, 28 bp, Artificial Sequence
  Probe
cggcccgggttcgattcccggtcaggga

SEQ ID NO: 36586 - DNA, 25 bp, Artificial Sequence
  Probe
cggctagctcagtcggtagagcatg

SEQ ID NO: 36587 - DNA, 28 bp, Artificial Sequence
  Probe
cggctagctcagtcggtagagcatgaga

SEQ ID NO: 36588 - DNA, 29 bp, Artificial Sequence
  Probe
cggctagctcagtcggtagagcatgagac

SEQ ID NO: 36589 - DNA, 26 bp, Artificial Sequence
  Probe
cggctagctcagtcggtagagcatgg

SEQ ID NO: 36590 - DNA, 28 bp, Artificial Sequence
  Probe
cggctagctcagtcggtagagcatggga

SEQ ID NO: 36591 - DNA, 29 bp, Artificial Sequence
  Probe
cggctagctcagtcggtagagcatgggac

SEQ ID NO: 36592 - DNA, 30 bp, Artificial Sequence; identical to SEQ ID NO: 778
  Probe

SEQ ID NO: 36593 - DNA, 30 bp, Artificial Sequence; identical to SEQ ID NO: 13204
  Probe

SEQ ID NO: 36594 - DNA, 31 bp, Artificial Sequence; identical to SEQ ID NO: 13205
  Probe

SEQ ID NO: 36595 - DNA, 32 bp, Artificial Sequence; identical to SEQ ID NO: 783
  Probe

SEQ ID NO: 36596 - DNA, 33 bp, Artificial Sequence; identical to SEQ ID NO: 784
  Probe

SEQ ID NO: 36597 - DNA, 27 bp, Artificial Sequence
  Probe
cgggagaccggggttcgattccccgac

SEQ ID NO: 36598 - DNA, 29 bp, Artificial Sequence
  Probe
cgggagaccggggttcgattccccgacgg

SEQ ID NO: 36599 - DNA, 30 bp, Artificial Sequence; identical to SEQ ID NO: 786
  Probe

SEQ ID NO: 36600 - DNA, 31 bp, Artificial Sequence; identical to SEQ ID NO: 787
  Probe

SEQ ID NO: 36601 - DNA, 32 bp, Artificial Sequence; identical to SEQ ID NO: 788
  Probe

SEQ ID NO: 36602 - DNA, 33 bp, Artificial Sequence; identical to SEQ ID NO: 789
  Probe

SEQ ID NO: 36603 - DNA, 31 bp, Artificial Sequence; identical to SEQ ID NO: 30520
  Probe

SEQ ID NO: 36604 - DNA, 32 bp, Artificial Sequence; identical to SEQ ID NO: 19283
  Probe

SEQ ID NO: 36605 - DNA, 31 bp, Artificial Sequence; identical to SEQ ID NO: 19290
  Probe

SEQ ID NO: 36606 - DNA, 32 bp, Artificial Sequence
  Probe
cgggaggcccgggttcgattcccggcccatgc

SEQ ID NO: 36607 - DNA, 25 bp, Artificial Sequence
  Probe
cgttagtatagtggtgagtatcccc

SEQ ID NO: 36608 - DNA, 26 bp, Artificial Sequence
  Probe
cgttagtatagtggtgagtatccccg

SEQ ID NO: 36609 - DNA, 18 bp, Artificial Sequence
  Probe
cgttcaggtcgcagtctc

SEQ ID NO: 36610 - DNA, 20 bp, Artificial Sequence
  Probe
cgttcaggtcgcagtctccc

SEQ ID NO: 36611 - DNA, 26 bp, Artificial Sequence
  Probe
cgttcaggtcgcagtctcccctggag

SEQ ID NO: 36612 - DNA, 23 bp, Artificial Sequence
  Probe
ctaacacgcgaaaggtccccggt

SEQ ID NO: 36613 - DNA, 20 bp, Artificial Sequence
  Probe
ctaagccagggattgtgggt

SEQ ID NO: 36614 - DNA, 27 bp, Artificial Sequence
  Probe
ctagaaatccattggggtctccccgcg

SEQ ID NO: 36615 - DNA, 30 bp, Artificial Sequence
  Probe
ctagaaatccattggggtctccccgcgcag

SEQ ID NO: 36616 - DNA, 20 bp, Artificial Sequence
  Probe
ctagtggttaggattcggcg

SEQ ID NO: 36617 - DNA, 38 bp, Artificial Sequence; identical to SEQ ID NO: 13244
  Probe

SEQ ID NO: 36618 - DNA, 46 bp, Artificial Sequence; identical to SEQ ID NO: 809
  Probe

SEQ ID NO: 36619 - DNA, 23 bp, Artificial Sequence
  Probe
ctcacaagaactgctaactcatg

SEQ ID NO: 36620 - DNA, 30 bp, Artificial Sequence
  Probe
ctcacaagaactgctaactcatgcccccat

SEQ ID NO: 36621 - DNA, 31 bp, Artificial Sequence
  Probe
ctcacaagaactgctaactcatgcccccatg

SEQ ID NO: 36622 - DNA, 34 bp, Artificial Sequence
  Probe
ctcacaagaactgctaactcatgcccccatgtct

SEQ ID NO: 36623 - DNA, 50 bp, Artificial Sequence; identical to SEQ ID NO: 813
  Probe

SEQ ID NO: 36624 - DNA, 18 bp, Artificial Sequence
  Probe
ctcacacgcgaaaggtcc

SEQ ID NO: 36625 - DNA, 19 bp, Artificial Sequence
  Probe
ctcacacgcgaaaggtccc

SEQ ID NO: 36626 - DNA, 20 bp, Artificial Sequence
  Probe
ctcacacgcgaaaggtcccc

SEQ ID NO: 36627 - DNA, 21 bp, Artificial Sequence
  Probe
ctcacacgcgaaaggtccccg

SEQ ID NO: 36628 - DNA, 22 bp, Artificial Sequence
  Probe
ctcacacgcgaaaggtccccgg

SEQ ID NO: 36629 - DNA, 23 bp, Artificial Sequence
  Probe
ctcacacgcgaaaggtccccggt

SEQ ID NO: 36630 - DNA, 38 bp, Artificial Sequence
  Probe
ctcaccgccgcggcccgggttcgattcccggtcaggga

SEQ ID NO: 36631 - DNA, 20 bp, Artificial Sequence
  Probe
ctcataatctgaaggtcgtg

SEQ ID NO: 36632 - DNA, 21 bp, Artificial Sequence
  Probe
ctcataatctgaaggtcgtga

SEQ ID NO: 36633 - DNA, 22 bp, Artificial Sequence
  Probe
ctcataatctgaaggtcgtgag

SEQ ID NO: 36634 - DNA, 23 bp, Artificial Sequence
  Probe
ctcataatctgaaggtcgtgagt

SEQ ID NO: 36635 - DNA, 22 bp, Artificial Sequence
  Probe
ctccagtctcttcgggggcgtg

SEQ ID NO: 36636 - DNA, 23 bp, Artificial Sequence
  Probe
ctccagtctcttcgggggcgtgg

SEQ ID NO: 36637 - DNA, 25 bp, Artificial Sequence
  Probe
ctccagtctcttcgggggcgtgggt

SEQ ID NO: 36638 - DNA, 23 bp, Artificial Sequence
  Probe
ctcctaagccagggattgtgggt

SEQ ID NO: 36639 - DNA, 25 bp, Artificial Sequence
  Probe
ctcgaaatccaatgggggttccccg

SEQ ID NO: 36640 - DNA, 27 bp, Artificial Sequence
  Probe
ctcgaaatccaatgggggttccccgcg

SEQ ID NO: 36641 - DNA, 29 bp, Artificial Sequence
  Probe
ctcgaaatccaatgggggttccccgcgca

SEQ ID NO: 36642 - DNA, 30 bp, Artificial Sequence
  Probe
ctcgaaatccaatgggggttccccgcgcag

SEQ ID NO: 36643 - DNA, 25 bp, Artificial Sequence
  Probe
ctcgaaatccaatggggtctccccg

SEQ ID NO: 36644 - DNA, 27 bp, Artificial Sequence
  Probe
ctcgaaatccaatggggtctccccgcg

SEQ ID NO: 36645 - DNA, 30 bp, Artificial Sequence
  Probe
ctcgaaatccaatggggtctccccgcgcag

SEQ ID NO: 36646 - DNA, 32 bp, Artificial Sequence
  Probe
ctcgaaatccaatggggtctccccgcgcaggt

SEQ ID NO: 36647 - DNA, 30 bp, Artificial Sequence
  Probe
ctcgaaatccaatggggtttccccgcacag

SEQ ID NO: 36648 - DNA, 18 bp, Artificial Sequence
  Probe
ctctcaccgccgcggccc

SEQ ID NO: 36649 - DNA, 19 bp, Artificial Sequence
  Probe
ctctcaccgccgcggcccg

SEQ ID NO: 36650 - DNA, 20 bp, Artificial Sequence
  Probe
ctctcaccgccgcggcccgg

SEQ ID NO: 36651 - DNA, 21 bp, Artificial Sequence
  Probe
ctctcaccgccgcggcccggg

SEQ ID NO: 36652 - DNA, 23 bp, Artificial Sequence
  Probe
ctctcaccgccgcggcccgggtt

SEQ ID NO: 36653 - DNA, 24 bp, Artificial Sequence
  Probe
ctctcaccgccgcggcccgggttc

SEQ ID NO: 36654 - DNA, 25 bp, Artificial Sequence
  Probe
ctctcaccgccgcggcccgggttcg

SEQ ID NO: 36655 - DNA, 28 bp, Artificial Sequence
  Probe
ctctcaccgccgcggcccgggttcgatt

SEQ ID NO: 36656 - DNA, 41 bp, Artificial Sequence
  Probe
ctctcaccgccgcggcccgggttcgattcccggtcagggaa

SEQ ID NO: 36657 - DNA, 18 bp, Artificial Sequence
  Probe
ctctgaatccagcgatcc

SEQ ID NO: 36658 - DNA, 19 bp, Artificial Sequence
  Probe
ctctgaatccagcgatccg

SEQ ID NO: 36659 - DNA, 20 bp, Artificial Sequence
  Probe
ctctgaatccagcgatccga

SEQ ID NO: 36660 - DNA, 21 bp, Artificial Sequence
  Probe
ctctgaatccagcgatccgag

SEQ ID NO: 36661 - DNA, 20 bp, Artificial Sequence
  Probe
ctgccacgcgggaggcccgg

SEQ ID NO: 36662 - DNA, 22 bp, Artificial Sequence
  Probe
ctgccacgcgggaggcccgggt

SEQ ID NO: 36663 - DNA, 38 bp, Artificial Sequence
  Probe
ctgccacgcgggaggcccgggttcgattcccggcccat

SEQ ID NO: 36664 - DNA, 20 bp, Artificial Sequence
  Probe
ctggtgcccgcgtgggttcg

SEQ ID NO: 36665 - DNA, 28 bp, Artificial Sequence
  Probe
ctggtggtctagtggttaggattcggcg

SEQ ID NO: 36666 - DNA, 19 bp, Artificial Sequence
  Probe
ctggtgtagtggtatcatg

SEQ ID NO: 36667 - DNA, 22 bp, Artificial Sequence
  Probe
ctggtgtagtggtatcatgcaa

SEQ ID NO: 36668 - DNA, 23 bp, Artificial Sequence
  Probe
ctggtgtagtggtatcatgcaag

SEQ ID NO: 36669 - DNA, 20 bp, Artificial Sequence
  Probe
ctgtcacgcgggagaccggg

SEQ ID NO: 36670 - DNA, 21 bp, Artificial Sequence
  Probe
ctgtcacgcgggagaccgggg

SEQ ID NO: 36671 - DNA, 22 bp, Artificial Sequence
  Probe
ctgtcacgcgggagaccggggt

SEQ ID NO: 36672 - DNA, 23 bp, Artificial Sequence
  Probe
ctgtcacgcgggagaccggggtt

SEQ ID NO: 36673 - DNA, 38 bp, Artificial Sequence; identical to SEQ ID NO: 13290
  Probe

SEQ ID NO: 36674 - DNA, 41 bp, Artificial Sequence
  Probe
ctgtcacgcgggagaccggggttcaattccccgacggggag

SEQ ID NO: 36675 - DNA, 25 bp, Artificial Sequence
  Probe
ctgtcacgcgggagaccggggttcg

SEQ ID NO: 36676 - DNA, 28 bp, Artificial Sequence
  Probe
ctgtcacgcgggagaccggggttcgatt

SEQ ID NO: 36677 - DNA, 29 bp, Artificial Sequence
  Probe
ctgtcacgcgggagaccggggttcgattc

SEQ ID NO: 36678 - DNA, 34 bp, Artificial Sequence; identical to SEQ ID NO: 13292
  Probe

SEQ ID NO: 36679 - DNA, 35 bp, Artificial Sequence; identical to SEQ ID NO: 19675
  Probe

SEQ ID NO: 36680 - DNA, 36 bp, Artificial Sequence; identical to SEQ ID NO: 19676
  Probe

SEQ ID NO: 36681 - DNA, 37 bp, Artificial Sequence; identical to SEQ ID NO: 13293
  Probe

SEQ ID NO: 36682 - DNA, 38 bp, Artificial Sequence; identical to SEQ ID NO: 13294
  Probe

SEQ ID NO: 36683 - DNA, 41 bp, Artificial Sequence
  Probe
ctgtcacgcgggagaccggggttcgattccccgacggggag

SEQ ID NO: 36684 - DNA, 21 bp, Artificial Sequence
  Probe
ctgttaaccgaaagattggtg

SEQ ID NO: 36685 - DNA, 19 bp, Artificial Sequence
  Probe
ctgttaaccgaaaggttgg

SEQ ID NO: 36686 - DNA, 20 bp, Artificial Sequence
  Probe
ctgttaaccgaaaggttggt

SEQ ID NO: 36687 - DNA, 21 bp, Artificial Sequence
  Probe
ctgttaaccgaaaggttggtg

SEQ ID NO: 36688 - DNA, 22 bp, Artificial Sequence
  Probe
ctgttaaccgaaaggttggtgg

SEQ ID NO: 36689 - DNA, 25 bp, Artificial Sequence
  Probe
ctgttaaccgaaaggttggtggttc

SEQ ID NO: 36690 - DNA, 26 bp, Artificial Sequence
  Probe
ctgttaaccgaaaggttggtggttcg

SEQ ID NO: 36691 - DNA, 41 bp, Artificial Sequence
  Probe
ctgttaaccgaaaggttggtggttcgagcccacccagggac

SEQ ID NO: 36692 - DNA, 42 bp, Artificial Sequence
  Probe
ctgttaaccgaaaggttggtggttcgagcccacccagggacg

SEQ ID NO: 36693 - DNA, 42 bp, Artificial Sequence
  Probe
ctgttaaccgaaaggttggtggttcgatcccacccagggacg

SEQ ID NO: 36694 - DNA, 21 bp, Artificial Sequence
  Probe
ctgttaactaaaaggttggtg

SEQ ID NO: 36695 - DNA, 20 bp, Artificial Sequence
  Probe
ctgttaactaagtgtttgtg

SEQ ID NO: 36696 - DNA, 21 bp, Artificial Sequence
  Probe
ctgttaactaagtgtttgtgg

SEQ ID NO: 36697 - DNA, 34 bp, Artificial Sequence
  Probe
ctgttaactaagtgtttgtgggtttaagtcccat

SEQ ID NO: 36698 - DNA, 20 bp, Artificial Sequence
  Probe
cttaaacccccttatttcta

SEQ ID NO: 36699 - DNA, 18 bp, Artificial Sequence
  Probe
cttccaagcagttgaccc

SEQ ID NO: 36700 - DNA, 19 bp, Artificial Sequence
  Probe
cttccaagcagttgacccg

SEQ ID NO: 36701 - DNA, 20 bp, Artificial Sequence
  Probe
cttccaagcagttgacccgg

SEQ ID NO: 36702 - DNA, 21 bp, Artificial Sequence
  Probe
cttccaagcagttgacccggg

SEQ ID NO: 36703 - DNA, 22 bp, Artificial Sequence
  Probe
cttccaagcagttgacccgggt

SEQ ID NO: 36704 - DNA, 22 bp, Artificial Sequence
  Probe
cttcgggtgcgagaggtcccgg

SEQ ID NO: 36705 - DNA, 23 bp, Artificial Sequence
  Probe
cttcgggtgcgagaggtcccggg

SEQ ID NO: 36706 - DNA, 27 bp, Artificial Sequence
  Probe
cttgaaatccaatggggtctccccgcg

SEQ ID NO: 36707 - DNA, 29 bp, Artificial Sequence
  Probe
cttgaaatccaatggggtctccccgcgca

SEQ ID NO: 36708 - DNA, 30 bp, Artificial Sequence
  Probe
cttgaaatccaatggggtctccccgcgcag

SEQ ID NO: 36709 - DNA, 30 bp, Artificial Sequence
  Probe
cttgaaatccattggggtctccccgcgcag

SEQ ID NO: 36710 - DNA, 18 bp, Artificial Sequence
  Probe
cttgtaaaccaggggtcg

SEQ ID NO: 36711 - DNA, 20 bp, Artificial Sequence
  Probe
cttgtaaaccaggggtcgcg

SEQ ID NO: 36712 - DNA, 22 bp, Artificial Sequence
  Probe
cttgtaaaccaggggtcgcgag

SEQ ID NO: 36713 - DNA, 17 bp, Artificial Sequence
  Probe
ctttacacgcagaaggt

SEQ ID NO: 36714 - DNA, 22 bp, Artificial Sequence
  Probe
ctttacacgcagaaggtcctgg

SEQ ID NO: 36715 - DNA, 23 bp, Artificial Sequence
  Probe
ctttacacgcagaaggtcctggg

SEQ ID NO: 36716 - DNA, 24 bp, Artificial Sequence
  Probe
ctttacacgcagaaggtcctgggt

SEQ ID NO: 36717 - DNA, 27 bp, Artificial Sequence
  Probe
ctttacacgcagaaggtcctgggttcg

SEQ ID NO: 36718 - DNA, 29 bp, Artificial Sequence
  Probe
ctttacacgcagaaggtcctgggttcgag

SEQ ID NO: 36719 - DNA, 41 bp, Artificial Sequence
  Probe
ctttacacgcagaaggtcctgggttcgagccccagtggaac

SEQ ID NO: 36720 - DNA, 42 bp, Artificial Sequence
  Probe
ctttacacgcagaaggtcctgggttcgagccccagtggaacc

SEQ ID NO: 36721 - DNA, 43 bp, Artificial Sequence
  Probe
ctttacacgcagaaggtcctgggttcgagccccagtggaacca

SEQ ID NO: 36722 - DNA, 34 bp, Artificial Sequence
  Probe
ctttcaagcagttaacgcgggttcgattcccggg

SEQ ID NO: 36723 - DNA, 19 bp, Artificial Sequence
  Probe
ctttcaccgccgcggcccg

SEQ ID NO: 36724 - DNA, 20 bp, Artificial Sequence
  Probe
ctttcaccgccgcggcccgg

SEQ ID NO: 36725 - DNA, 21 bp, Artificial Sequence
  Probe
ctttcaccgccgcggcccggg

SEQ ID NO: 36726 - DNA, 21 bp, Artificial Sequence
  Probe
ctttgaatccagcaatccgag

SEQ ID NO: 36727 - DNA, 19 bp, Artificial Sequence
  Probe
ctttgaatccagcgatccg

SEQ ID NO: 36728 - DNA, 20 bp, Artificial Sequence
  Probe
ctttgaatccagcgatccga

SEQ ID NO: 36729 - DNA, 21 bp, Artificial Sequence
  Probe
ctttgaatccagcgatccgag

SEQ ID NO: 36730 - DNA, 21 bp, Artificial Sequence
  Probe
ctttgcacgtatgaggccccg

SEQ ID NO: 36731 - DNA, 22 bp, Artificial Sequence
  Probe
ctttgggtgcgagaggtcccgg

SEQ ID NO: 36732 - DNA, 23 bp, Artificial Sequence
  Probe
ctttgggtgcgagaggtcccggg

SEQ ID NO: 36733 - DNA, 24 bp, Artificial Sequence
  Probe
ctttgggtgcgagaggtcccgggt

SEQ ID NO: 36734 - DNA, 24 bp, Artificial Sequence
  Probe
ctttgggtgctaatggtggagtta

SEQ ID NO: 36735 - DNA, 20 bp, Artificial Sequence
  Probe
cttttaatctgagggtccag

SEQ ID NO: 36736 - DNA, 18 bp, Artificial Sequence
  Probe
gaaaaagtcatggaggcc

SEQ ID NO: 36737 - DNA, 21 bp, Artificial Sequence
  Probe
gaaaaagtcatggaggccatg

SEQ ID NO: 36738 - DNA, 27 bp, Artificial Sequence
  Probe
gaaaaagtcatggaggccatggggttg

SEQ ID NO: 36739 - DNA, 50 bp, Artificial Sequence; identical to SEQ ID NO: 5419
  Probe

SEQ ID NO: 36740 - DNA, 50 bp, Artificial Sequence; identical to SEQ ID NO: 5440
  Probe

SEQ ID NO: 36741 - DNA, 28 bp, Artificial Sequence
  Probe
gaagattgagggttcgagtcccttcgtg

SEQ ID NO: 36742 - DNA, 32 bp, Artificial Sequence; identical to SEQ ID NO: 5489
  Probe

SEQ ID NO: 36743 - DNA, 50 bp, Artificial Sequence; identical to SEQ ID NO: 5505
  Probe

SEQ ID NO: 36744 - DNA, 29 bp, Artificial Sequence
  Probe
gacccagtggcctaatggataaggcatca

SEQ ID NO: 36745 - DNA, 30 bp, Artificial Sequence; identical to SEQ ID NO: 8599
  Probe

SEQ ID NO: 36746 - DNA, 31 bp, Artificial Sequence; identical to SEQ ID NO: 904
  Probe

SEQ ID NO: 36747 - DNA, 34 bp, Artificial Sequence; identical to SEQ ID NO: 907
  Probe

SEQ ID NO: 36748 - DNA, 26 bp, Artificial Sequence
  Probe
gaccggggttcgattccccgacgggg

SEQ ID NO: 36749 - DNA, 28 bp, Artificial Sequence
  Probe
gaccggggttcgattccccgacggggag

SEQ ID NO: 36750 - DNA, 20 bp, Artificial Sequence
  Probe
gactctgaatccagcgatcc

SEQ ID NO: 36751 - DNA, 21 bp, Artificial Sequence
  Probe
gactctgaatccagcgatccg

SEQ ID NO: 36752 - DNA, 22 bp, Artificial Sequence
  Probe
gactctgaatccagcgatccga

SEQ ID NO: 36753 - DNA, 23 bp, Artificial Sequence
  Probe
gactctgaatccagcgatccgag

SEQ ID NO: 36754 - DNA, 41 bp, Artificial Sequence
  Probe
gactctgaatccagcgatccgagttcaaatctcggtggaac

SEQ ID NO: 36755 - DNA, 42 bp, Artificial Sequence
  Probe
gactctgaatccagcgatccgagttcaaatctcggtggaacc

SEQ ID NO: 36756 - DNA, 41 bp, Artificial Sequence
  Probe
gactctgaatccagcgatccgagttcaagtctcggtggaac

SEQ ID NO: 36757 - DNA, 42 bp, Artificial Sequence
  Probe
gactctgaatccagcgatccgagttcaagtctcggtggaacc

SEQ ID NO: 36758 - DNA, 41 bp, Artificial Sequence
  Probe
gactctgaatccagcgatccgagttcgagtctcggtggaac

SEQ ID NO: 36759 - DNA, 23 bp, Artificial Sequence
  Probe
gactttgaatccagcaatccgag

SEQ ID NO: 36760 - DNA, 18 bp, Artificial Sequence
  Probe
gactttgaatccagcgat

SEQ ID NO: 36761 - DNA, 21 bp, Artificial Sequence
  Probe
gactttgaatccagcgatccg

SEQ ID NO: 36762 - DNA, 22 bp, Artificial Sequence
  Probe
gactttgaatccagcgatccga

SEQ ID NO: 36763 - DNA, 23 bp, Artificial Sequence
  Probe
gactttgaatccagcgatccgag

SEQ ID NO: 36764 - DNA, 24 bp, Artificial Sequence
  Probe
gactttgaatccagcgatccgagt

SEQ ID NO: 36765 - DNA, 41 bp, Artificial Sequence
  Probe
gactttgaatccagcgatccgagttcaaatctcggtgggac

SEQ ID NO: 36766 - DNA, 42 bp, Artificial Sequence
  Probe
gactttgaatccagcgatccgagttcaaatctcggtgggacc

SEQ ID NO: 36767 - DNA, 20 bp, Artificial Sequence
  Probe
gagaaagctcacaagaactg

SEQ ID NO: 36768 - DNA, 22 bp, Artificial Sequence
  Probe
gagaaagctcacaagaactgct

SEQ ID NO: 36769 - DNA, 23 bp, Artificial Sequence
  Probe
gagaaagctcacaagaactgcta

SEQ ID NO: 36770 - DNA, 25 bp, Artificial Sequence
  Probe
gagaaagctcacaagaactgctaac

SEQ ID NO: 36771 - DNA, 26 bp, Artificial Sequence
  Probe
gagaaagctcacaagaactgctaact

SEQ ID NO: 36772 - DNA, 27 bp, Artificial Sequence
  Probe
gagaaagctcacaagaactgctaactc

SEQ ID NO: 36773 - DNA, 30 bp, Artificial Sequence; identical to SEQ ID NO: 932
  Probe

SEQ ID NO: 36774 - DNA, 36 bp, Artificial Sequence; identical to SEQ ID NO: 938
  Probe

SEQ ID NO: 36775 - DNA, 38 bp, Artificial Sequence; identical to SEQ ID NO: 940
  Probe

SEQ ID NO: 36776 - DNA, 41 bp, Artificial Sequence; identical to SEQ ID NO: 943
  Probe

SEQ ID NO: 36777 - DNA, 45 bp, Artificial Sequence; identical to SEQ ID NO: 947
  Probe

SEQ ID NO: 36778 - DNA, 50 bp, Artificial Sequence; identical to SEQ ID NO: 950
  Probe

SEQ ID NO: 36779 - DNA, 30 bp, Artificial Sequence; identical to SEQ ID NO: 20160
  Probe

SEQ ID NO: 36780 - DNA, 27 bp, Artificial Sequence
  Probe
gagaccggggttcgattccccgacggg

SEQ ID NO: 36781 - DNA, 28 bp, Artificial Sequence
  Probe
gagaccggggttcgattccccgacgggg

SEQ ID NO: 36782 - DNA, 29 bp, Artificial Sequence
  Probe
gagaccggggttcgattccccgacgggga

SEQ ID NO: 36783 - DNA, 30 bp, Artificial Sequence; identical to SEQ ID NO: 957
  Probe

SEQ ID NO: 36784 - DNA, 45 bp, Artificial Sequence; identical to SEQ ID NO: 964
  Probe

SEQ ID NO: 36785 - DNA, 50 bp, Artificial Sequence; identical to SEQ ID NO: 965
  Probe

SEQ ID NO: 36786 - DNA, 29 bp, Artificial Sequence
  Probe
gaggccccgggttcgatccccggcatctc

SEQ ID NO: 36787 - DNA, 30 bp, Artificial Sequence
  Probe
gaggccccgggttcgatccccggcatctcc

SEQ ID NO: 36788 - DNA, 18 bp, Artificial Sequence
  Probe
gatcgaaaccatcctctg

SEQ ID NO: 36789 - DNA, 20 bp, Artificial Sequence
  Probe
gatcgaaaccatcctctgct

SEQ ID NO: 36790 - DNA, 50 bp, Artificial Sequence; identical to SEQ ID NO: 977
  Probe

SEQ ID NO: 36791 - DNA, 21 bp, Artificial Sequence
  Probe
gattcccattcttgcgacccg

SEQ ID NO: 36792 - DNA, 22 bp, Artificial Sequence
  Probe
gattcccattcttgcgacccgg

SEQ ID NO: 36793 - DNA, 34 bp, Artificial Sequence; identical to SEQ ID NO: 20528
  Probe

SEQ ID NO: 36794 - DNA, 35 bp, Artificial Sequence; identical to SEQ ID NO: 13433
  Probe

SEQ ID NO: 36795 - DNA, 29 bp, Artificial Sequence
  Probe
gcactggtggttcagtggtagaattctcg

SEQ ID NO: 36796 - DNA, 32 bp, Artificial Sequence; identical to SEQ ID NO: 13438
  Probe

SEQ ID NO: 36797 - DNA, 33 bp, Artificial Sequence; identical to SEQ ID NO: 13439
  Probe

SEQ ID NO: 36798 - DNA, 35 bp, Artificial Sequence; identical to SEQ ID NO: 992
  Probe

SEQ ID NO: 36799 - DNA, 50 bp, Artificial Sequence; identical to SEQ ID NO: 5851
  Probe

SEQ ID NO: 36800 - DNA, 34 bp, Artificial Sequence
  Probe
gcatgaggtcccgggttcgatccccagcatctcc

SEQ ID NO: 36801 - DNA, 28 bp, Artificial Sequence
  Probe
gcatgggtggttcagtggtagaattctc

SEQ ID NO: 36802 - DNA, 29 bp, Artificial Sequence
  Probe
gcatgggtggttcagtggtagaattctcg

SEQ ID NO: 36803 - DNA, 30 bp, Artificial Sequence; identical to SEQ ID NO: 1002
  Probe

SEQ ID NO: 36804 - DNA, 31 bp, Artificial Sequence; identical to SEQ ID NO: 1003
  Probe

SEQ ID NO: 36805 - DNA, 32 bp, Artificial Sequence; identical to SEQ ID NO: 1004
  Probe

SEQ ID NO: 36806 - DNA, 33 bp, Artificial Sequence; identical to SEQ ID NO: 1005
  Probe

SEQ ID NO: 36807 - DNA, 34 bp, Artificial Sequence; identical to SEQ ID NO: 1006
  Probe

SEQ ID NO: 36808 - DNA, 35 bp, Artificial Sequence; identical to SEQ ID NO: 1007
  Probe

SEQ ID NO: 36809 - DNA, 50 bp, Artificial Sequence; identical to SEQ ID NO: 1010
  Probe

SEQ ID NO: 36810 - DNA, 50 bp, Artificial Sequence; identical to SEQ ID NO: 1012
  Probe

SEQ ID NO: 36811 - DNA, 29 bp, Artificial Sequence
  Probe
gcattggtggttcaatggtagaattctcg

SEQ ID NO: 36812 - DNA, 50 bp, Artificial Sequence; identical to SEQ ID NO: 25407
  Probe

SEQ ID NO: 36813 - DNA, 38 bp, Artificial Sequence; identical to SEQ ID NO: 1014
  Probe

SEQ ID NO: 36814 - DNA, 50 bp, Artificial Sequence; identical to SEQ ID NO: 1020
  Probe

SEQ ID NO: 36815 - DNA, 50 bp, Artificial Sequence; identical to SEQ ID NO: 1024
  Probe

SEQ ID NO: 36816 - DNA, 22 bp, Artificial Sequence
  Probe
gcccataacccagaggtcgatg

SEQ ID NO: 36817 - DNA, 29 bp, Artificial Sequence
  Probe
gccccagtggcctaatggataaggcattg

SEQ ID NO: 36818 - DNA, 26 bp, Artificial Sequence
  Probe
gccccgggttcaatccccggcacctc

SEQ ID NO: 36819 - DNA, 27 bp, Artificial Sequence
  Probe
gccccgggttcaatccccggcacctcc

SEQ ID NO: 36820 - DNA, 18 bp, Artificial Sequence
  Probe
gcccggatagctcagtcg

SEQ ID NO: 36821 - DNA, 19 bp, Artificial Sequence
  Probe
gcccggatagctcagtcgg

SEQ ID NO: 36822 - DNA, 20 bp, Artificial Sequence
  Probe
gcccggatagctcagtcggt

SEQ ID NO: 36823 - DNA, 21 bp, Artificial Sequence
  Probe
gcccggatagctcagtcggta

SEQ ID NO: 36824 - DNA, 22 bp, Artificial Sequence
  Probe
gcccggatagctcagtcggtag

SEQ ID NO: 36825 - DNA, 24 bp, Artificial Sequence
  Probe
gcccggatagctcagtcggtagag

SEQ ID NO: 36826 - DNA, 25 bp, Artificial Sequence
  Probe
gcccggatagctcagtcggtagagc

SEQ ID NO: 36827 - DNA, 26 bp, Artificial Sequence
  Probe
gcccggatagctcagtcggtagagca

SEQ ID NO: 36828 - DNA, 27 bp, Artificial Sequence
  Probe
gcccggatagctcagtcggtagagcat

SEQ ID NO: 36829 - DNA, 28 bp, Artificial Sequence
  Probe
gcccggatagctcagtcggtagagcatc

SEQ ID NO: 36830 - DNA, 29 bp, Artificial Sequence
  Probe
gcccggatagctcagtcggtagagcatca

SEQ ID NO: 36831 - DNA, 30 bp, Artificial Sequence; identical to SEQ ID NO: 1038
  Probe

SEQ ID NO: 36832 - DNA, 31 bp, Artificial Sequence; identical to SEQ ID NO: 1039
  Probe

SEQ ID NO: 36833 - DNA, 32 bp, Artificial Sequence; identical to SEQ ID NO: 1040
  Probe

SEQ ID NO: 36834 - DNA, 33 bp, Artificial Sequence; identical to SEQ ID NO: 1041
  Probe

SEQ ID NO: 36835 - DNA, 34 bp, Artificial Sequence; identical to SEQ ID NO: 1042
  Probe

SEQ ID NO: 36836 - DNA, 35 bp, Artificial Sequence; identical to SEQ ID NO: 1043
  Probe

SEQ ID NO: 36837 - DNA, 36 bp, Artificial Sequence; identical to SEQ ID NO: 1044
  Probe

SEQ ID NO: 36838 - DNA, 50 bp, Artificial Sequence; identical to SEQ ID NO: 1046
  Probe

SEQ ID NO: 36839 - DNA, 18 bp, Artificial Sequence
  Probe
gcccggctagctcagtcg

SEQ ID NO: 36840 - DNA, 32 bp, Artificial Sequence; identical to SEQ ID NO: 5994
  Probe

SEQ ID NO: 36841 - DNA, 20 bp, Artificial Sequence
  Probe
gcccggctagctcagtcggt

SEQ ID NO: 36842 - DNA, 22 bp, Artificial Sequence
  Probe
gcccggctagctcagtcggtag

SEQ ID NO: 36843 - DNA, 23 bp, Artificial Sequence
  Probe
gcccggctagctcagtcggtaga

SEQ ID NO: 36844 - DNA, 24 bp, Artificial Sequence
  Probe
gcccggctagctcagtcggtagag

SEQ ID NO: 36845 - DNA, 25 bp, Artificial Sequence
  Probe
gcccggctagctcagtcggtagagc

SEQ ID NO: 36846 - DNA, 26 bp, Artificial Sequence
  Probe
gcccggctagctcagtcggtagagca

SEQ ID NO: 36847 - DNA, 27 bp, Artificial Sequence
  Probe
gcccggctagctcagtcggtagagcat

SEQ ID NO: 36848 - DNA, 28 bp, Artificial Sequence
  Probe
gcccggctagctcagtcggtagagcatg

SEQ ID NO: 36849 - DNA, 29 bp, Artificial Sequence
  Probe
gcccggctagctcagtcggtagagcatga

SEQ ID NO: 36850 - DNA, 30 bp, Artificial Sequence; identical to SEQ ID NO: 1062
  Probe

SEQ ID NO: 36851 - DNA, 31 bp, Artificial Sequence; identical to SEQ ID NO: 1063
  Probe

SEQ ID NO: 36852 - DNA, 32 bp, Artificial Sequence; identical to SEQ ID NO: 1064
  Probe

SEQ ID NO: 36853 - DNA, 34 bp, Artificial Sequence; identical to SEQ ID NO: 1066
  Probe

SEQ ID NO: 36854 - DNA, 33 bp, Artificial Sequence; identical to SEQ ID NO: 1070
  Probe

SEQ ID NO: 36855 - DNA, 34 bp, Artificial Sequence; identical to SEQ ID NO: 1071
  Probe

SEQ ID NO: 36856 - DNA, 35 bp, Artificial Sequence; identical to SEQ ID NO: 1072
  Probe

SEQ ID NO: 36857 - DNA, 36 bp, Artificial Sequence; identical to SEQ ID NO: 1073
  Probe

SEQ ID NO: 36858 - DNA, 42 bp, Artificial Sequence; identical to SEQ ID NO: 1077
  Probe

SEQ ID NO: 36859 - DNA, 50 bp, Artificial Sequence; identical to SEQ ID NO: 1078
  Probe

SEQ ID NO: 36860 - DNA, 29 bp, Artificial Sequence
  Probe
gcccggctagctcagtcggtagagcatgg

SEQ ID NO: 36861 - DNA, 30 bp, Artificial Sequence; identical to SEQ ID NO: 1080
  Probe

SEQ ID NO: 36862 - DNA, 31 bp, Artificial Sequence; identical to SEQ ID NO: 1081
  Probe

SEQ ID NO: 36863 - DNA, 32 bp, Artificial Sequence; identical to SEQ ID NO: 1082
  Probe

SEQ ID NO: 36864 - DNA, 33 bp, Artificial Sequence; identical to SEQ ID NO: 1083
  Probe

SEQ ID NO: 36865 - DNA, 34 bp, Artificial Sequence; identical to SEQ ID NO: 1084
  Probe

SEQ ID NO: 36866 - DNA, 35 bp, Artificial Sequence; identical to SEQ ID NO: 1085
  Probe

SEQ ID NO: 36867 - DNA, 36 bp, Artificial Sequence; identical to SEQ ID NO: 1086
  Probe

SEQ ID NO: 36868 - DNA, 50 bp, Artificial Sequence; identical to SEQ ID NO: 1091
  Probe

SEQ ID NO: 36869 - DNA, 50 bp, Artificial Sequence; identical to SEQ ID NO: 6007
  Probe

SEQ ID NO: 36870 - DNA, 32 bp, Artificial Sequence; identical to SEQ ID NO: 6021
  Probe

SEQ ID NO: 36871 - DNA, 30 bp, Artificial Sequence; identical to SEQ ID NO: 1105
  Probe

SEQ ID NO: 36872 - DNA, 31 bp, Artificial Sequence; identical to SEQ ID NO: 1106
  Probe

SEQ ID NO: 36873 - DNA, 34 bp, Artificial Sequence; identical to SEQ ID NO: 1109
  Probe

SEQ ID NO: 36874 - DNA, 36 bp, Artificial Sequence; identical to SEQ ID NO: 1111
  Probe

SEQ ID NO: 36875 - DNA, 21 bp, Artificial Sequence
  Probe
gcctcacacgcgaaaggtccc

SEQ ID NO: 36876 - DNA, 22 bp, Artificial Sequence
  Probe
gcctcacacgcgaaaggtcccc

SEQ ID NO: 36877 - DNA, 23 bp, Artificial Sequence
  Probe
gcctcacacgcgaaaggtccccg

SEQ ID NO: 36878 - DNA, 24 bp, Artificial Sequence
  Probe
gcctcacacgcgaaaggtccccgg

SEQ ID NO: 36879 - DNA, 25 bp, Artificial Sequence
  Probe
gcctcacacgcgaaaggtccccggt

SEQ ID NO: 36880 - DNA, 41 bp, Artificial Sequence
  Probe
gcctcacacgcgaaaggtccccggttcgaaaccgggcggaa

SEQ ID NO: 36881 - DNA, 42 bp, Artificial Sequence
  Probe
gcctcacacgcgaaaggtccccggttcgaaaccgggcggaaa

SEQ ID NO: 36882 - DNA, 44 bp, Artificial Sequence
  Probe
gcctcacacgcgaaaggtccccggttcgaaaccgggcggaaaca

SEQ ID NO: 36883 - DNA, 41 bp, Artificial Sequence
  Probe
gcctcacacgcgaaaggtccccggttcgatcccgggcggaa

SEQ ID NO: 36884 - DNA, 42 bp, Artificial Sequence
  Probe
gcctcacacgcgaaaggtccccggttcgatcccgggcggaaa

SEQ ID NO: 36885 - DNA, 25 bp, Artificial Sequence
  Probe
gcctccggagctggggattgtgggt

SEQ ID NO: 36886 - DNA, 24 bp, Artificial Sequence
  Probe
gcctcctaagccagggattgtggg

SEQ ID NO: 36887 - DNA, 25 bp, Artificial Sequence
  Probe
gcctcctaagccagggattgtgggt

SEQ ID NO: 36888 - DNA, 41 bp, Artificial Sequence
  Probe
gcctgccacgcgggaggcccgggttcgattcccggcccatg

SEQ ID NO: 36889 - DNA, 29 bp, Artificial Sequence
  Probe
gcctggatagctcagtcggtagagcatca

SEQ ID NO: 36890 - DNA, 30 bp, Artificial Sequence; identical to SEQ ID NO: 10425
  Probe

SEQ ID NO: 36891 - DNA, 31 bp, Artificial Sequence; identical to SEQ ID NO: 1115
  Probe

SEQ ID NO: 36892 - DNA, 32 bp, Artificial Sequence; identical to SEQ ID NO: 1116
  Probe

SEQ ID NO: 36893 - DNA, 33 bp, Artificial Sequence; identical to SEQ ID NO: 1117
  Probe

SEQ ID NO: 36894 - DNA, 34 bp, Artificial Sequence; identical to SEQ ID NO: 6054
  Probe

SEQ ID NO: 36895 - DNA, 50 bp, Artificial Sequence
  Probe
gcctggatagctcagtcggtagagcatcagacttttaatctgagggtcca

SEQ ID NO: 36896 - DNA, 30 bp, Artificial Sequence
  Probe
gcctggatagctcagttggtagagcatcag

SEQ ID NO: 36897 - DNA, 31 bp, Artificial Sequence; identical to SEQ ID NO: 1120
  Probe

SEQ ID NO: 36898 - DNA, 32 bp, Artificial Sequence; identical to SEQ ID NO: 1121
  Probe

SEQ ID NO: 36899 - DNA, 33 bp, Artificial Sequence; identical to SEQ ID NO: 1122
  Probe

SEQ ID NO: 36900 - DNA, 50 bp, Artificial Sequence; identical to SEQ ID NO: 6055
  Probe

SEQ ID NO: 36901 - DNA, 26 bp, Artificial Sequence
  Probe
gcctgggtagctcagtcggtagagca

SEQ ID NO: 36902 - DNA, 29 bp, Artificial Sequence
  Probe
gcctgggtagctcagtcggtagagcatca

SEQ ID NO: 36903 - DNA, 30 bp, Artificial Sequence
  Probe
gcctgggtagctcagtcggtagagcatcag

SEQ ID NO: 36904 - DNA, 31 bp, Artificial Sequence; identical to SEQ ID NO: 1126
  Probe

SEQ ID NO: 36905 - DNA, 32 bp, Artificial Sequence; identical to SEQ ID NO: 1127
  Probe

SEQ ID NO: 36906 - DNA, 33 bp, Artificial Sequence; identical to SEQ ID NO: 1128
  Probe

SEQ ID NO: 36907 - DNA, 50 bp, Artificial Sequence
  Probe
gcctgggtagctcagtcggtagagcatcagacttttaatctgagggtcca

SEQ ID NO: 36908 - DNA, 24 bp, Artificial Sequence
  Probe
gcctgtcacgcgggagaccggggt

SEQ ID NO: 36909 - DNA, 41 bp, Artificial Sequence; identical to SEQ ID NO: 13617
  Probe

SEQ ID NO: 36910 - DNA, 42 bp, Artificial Sequence; identical to SEQ ID NO: 20956
  Probe

SEQ ID NO: 36911 - DNA, 43 bp, Artificial Sequence
  Probe
gcctgtcacgcgggagaccggggttcaattccccgacggggag

SEQ ID NO: 36912 - DNA, 27 bp, Artificial Sequence
  Probe
gcctgtcacgcgggagaccggggttcg

SEQ ID NO: 36913 - DNA, 37 bp, Artificial Sequence; identical to SEQ ID NO: 20965
  Probe

SEQ ID NO: 36914 - DNA, 41 bp, Artificial Sequence; identical to SEQ ID NO: 13622
  Probe

SEQ ID NO: 36915 - DNA, 42 bp, Artificial Sequence; identical to SEQ ID NO: 20966
  Probe

SEQ ID NO: 36916 - DNA, 43 bp, Artificial Sequence; identical to SEQ ID NO: 1132
  Probe

SEQ ID NO: 36917 - DNA, 21 bp, Artificial Sequence
  Probe
gccttccaagcagttgacccg

SEQ ID NO: 36918 - DNA, 22 bp, Artificial Sequence
  Probe
gccttccaagcagttgacccgg

SEQ ID NO: 36919 - DNA, 23 bp, Artificial Sequence
  Probe
gccttccaagcagttgacccggg

SEQ ID NO: 36920 - DNA, 19 bp, Artificial Sequence
  Probe
gcgccgctggtgtagtggt

SEQ ID NO: 36921 - DNA, 20 bp, Artificial Sequence
  Probe
gcgccgctggtgtagtggta

SEQ ID NO: 36922 - DNA, 21 bp, Artificial Sequence
  Probe
gcgccgctggtgtagtggtat

SEQ ID NO: 36923 - DNA, 22 bp, Artificial Sequence
  Probe
gcgccgctggtgtagtggtatc

SEQ ID NO: 36924 - DNA, 23 bp, Artificial Sequence
  Probe
gcgccgctggtgtagtggtatca

SEQ ID NO: 36925 - DNA, 24 bp, Artificial Sequence
  Probe
gcgccgctggtgtagtggtatcat

SEQ ID NO: 36926 - DNA, 25 bp, Artificial Sequence
  Probe
gcgccgctggtgtagtggtatcatg

SEQ ID NO: 36927 - DNA, 26 bp, Artificial Sequence
  Probe
gcgccgctggtgtagtggtatcatgc

SEQ ID NO: 36928 - DNA, 27 bp, Artificial Sequence
  Probe
gcgccgctggtgtagtggtatcatgca

SEQ ID NO: 36929 - DNA, 28 bp, Artificial Sequence
  Probe
gcgccgctggtgtagtggtatcatgcaa

SEQ ID NO: 36930 - DNA, 29 bp, Artificial Sequence
  Probe
gcgccgctggtgtagtggtatcatgcaag

SEQ ID NO: 36931 - DNA, 30 bp, Artificial Sequence; identical to SEQ ID NO: 1149
  Probe

SEQ ID NO: 36932 - DNA, 31 bp, Artificial Sequence; identical to SEQ ID NO: 1150
  Probe

SEQ ID NO: 36933 - DNA, 32 bp, Artificial Sequence; identical to SEQ ID NO: 1151
  Probe

SEQ ID NO: 36934 - DNA, 33 bp, Artificial Sequence; identical to SEQ ID NO: 1152
  Probe

SEQ ID NO: 36935 - DNA, 34 bp, Artificial Sequence; identical to SEQ ID NO: 1153
  Probe

SEQ ID NO: 36936 - DNA, 35 bp, Artificial Sequence; identical to SEQ ID NO: 1154
  Probe

SEQ ID NO: 36937 - DNA, 36 bp, Artificial Sequence; identical to SEQ ID NO: 1155
  Probe

SEQ ID NO: 36938 - DNA, 50 bp, Artificial Sequence; identical to SEQ ID NO: 1161
  Probe

SEQ ID NO: 36939 - DNA, 37 bp, Artificial Sequence; identical to SEQ ID NO: 1164
  Probe

SEQ ID NO: 36940 - DNA, 29 bp, Artificial Sequence
  Probe
gcggcccgggttcgattcccggtcaggga

SEQ ID NO: 36941 - DNA, 31 bp, Artificial Sequence; identical to SEQ ID NO: 6105
  Probe

SEQ ID NO: 36942 - DNA, 32 bp, Artificial Sequence; identical to SEQ ID NO: 6106
  Probe

SEQ ID NO: 36943 - DNA, 34 bp, Artificial Sequence; identical to SEQ ID NO: 1167
  Probe

SEQ ID NO: 36944 - DNA, 30 bp, Artificial Sequence; identical to SEQ ID NO: 1169
  Probe

SEQ ID NO: 36945 - DNA, 31 bp, Artificial Sequence; identical to SEQ ID NO: 1170
  Probe

SEQ ID NO: 36946 - DNA, 32 bp, Artificial Sequence; identical to SEQ ID NO: 1171
  Probe

SEQ ID NO: 36947 - DNA, 33 bp, Artificial Sequence; identical to SEQ ID NO: 1172
  Probe

SEQ ID NO: 36948 - DNA, 34 bp, Artificial Sequence; identical to SEQ ID NO: 1173
  Probe

SEQ ID NO: 36949 - DNA, 32 bp, Artificial Sequence; identical to SEQ ID NO: 6129
  Probe

SEQ ID NO: 36950 - DNA, 22 bp, Artificial Sequence
  Probe
gcgttggtggtatagtggtaag

SEQ ID NO: 36951 - DNA, 24 bp, Artificial Sequence
  Probe
gcgttggtggtatagtggtaagca

SEQ ID NO: 36952 - DNA, 25 bp, Artificial Sequence
  Probe
gcgttggtggtatagtggtaagcat

SEQ ID NO: 36953 - DNA, 26 bp, Artificial Sequence
  Probe
gcgttggtggtatagtggtaagcata

SEQ ID NO: 36954 - DNA, 27 bp, Artificial Sequence
  Probe
gcgttggtggtatagtggtaagcatag

SEQ ID NO: 36955 - DNA, 28 bp, Artificial Sequence
  Probe
gcgttggtggtatagtggtaagcatagc

SEQ ID NO: 36956 - DNA, 29 bp, Artificial Sequence
  Probe
gcgttggtggtatagtggtaagcatagct

SEQ ID NO: 36957 - DNA, 30 bp, Artificial Sequence; identical to SEQ ID NO: 1183
  Probe

SEQ ID NO: 36958 - DNA, 31 bp, Artificial Sequence; identical to SEQ ID NO: 1184
  Probe

SEQ ID NO: 36959 - DNA, 32 bp, Artificial Sequence; identical to SEQ ID NO: 1185
  Probe

SEQ ID NO: 36960 - DNA, 36 bp, Artificial Sequence; identical to SEQ ID NO: 1189
  Probe

SEQ ID NO: 36961 - DNA, 50 bp, Artificial Sequence; identical to SEQ ID NO: 1192
  Probe

SEQ ID NO: 36962 - DNA, 43 bp, Artificial Sequence; identical to SEQ ID NO: 6159
  Probe

SEQ ID NO: 36963 - DNA, 44 bp, Artificial Sequence; identical to SEQ ID NO: 1194
  Probe

SEQ ID NO: 36964 - DNA, 50 bp, Artificial Sequence; identical to SEQ ID NO: 1195
  Probe

SEQ ID NO: 36965 - DNA, 50 bp, Artificial Sequence; identical to SEQ ID NO: 1197
  Probe

SEQ ID NO: 36966 - DNA, 27 bp, Artificial Sequence
  Probe
gcgttggtggtttagtggtagaattct

SEQ ID NO: 36967 - DNA, 29 bp, Artificial Sequence
  Probe
gcgttggtggtttagtggtagaattctcg

SEQ ID NO: 36968 - DNA, 24 bp, Artificial Sequence
  Probe
gctagctcagtcggtagagcatgg

SEQ ID NO: 36969 - DNA, 26 bp, Artificial Sequence
  Probe
gctagctcagtcggtagagcatggga

SEQ ID NO: 36970 - DNA, 27 bp, Artificial Sequence
  Probe
gctagctcagtcggtagagcatgggac

SEQ ID NO: 36971 - DNA, 24 bp, Artificial Sequence
  Probe
gctcacaagaactgctaactcatg

SEQ ID NO: 36972 - DNA, 50 bp, Artificial Sequence; identical to SEQ ID NO: 1205
  Probe

SEQ ID NO: 36973 - DNA, 20 bp, Artificial Sequence
  Probe
gctctcaccgccgcggcccg

SEQ ID NO: 36974 - DNA, 41 bp, Artificial Sequence
  Probe
gctctcaccgccgcggcccgggttcgattcccggtcaggga

SEQ ID NO: 36975 - DNA, 22 bp, Artificial Sequence
  Probe
gctgttaaccgaaaggttggtg

SEQ ID NO: 36976 - DNA, 26 bp, Artificial Sequence
  Probe
gctgttaaccgaaaggttggtggttc

SEQ ID NO: 36977 - DNA, 22 bp, Artificial Sequence
  Probe
gctgttaactaaaaggttggtg

SEQ ID NO: 36978 - DNA, 21 bp, Artificial Sequence
  Probe
gctgttaactaagtgtttgtg

SEQ ID NO: 36979 - DNA, 22 bp, Artificial Sequence
  Probe
gctgttaactaagtgtttgtgg

SEQ ID NO: 36980 - DNA, 24 bp, Artificial Sequence
  Probe
gcttagggtgcgagaggtcccggg

SEQ ID NO: 36981 - DNA, 24 bp, Artificial Sequence
  Probe
gcttctgtagtgtagtggttatca

SEQ ID NO: 36982 - DNA, 28 bp, Artificial Sequence
  Probe
gcttctgtagtgtagtggttatcacgtt

SEQ ID NO: 36983 - DNA, 29 bp, Artificial Sequence
  Probe
gcttctgtagtgtagtggttatcacgttc

SEQ ID NO: 36984 - DNA, 30 bp, Artificial Sequence; identical to SEQ ID NO: 8646
  Probe

SEQ ID NO: 36985 - DNA, 31 bp, Artificial Sequence; identical to SEQ ID NO: 1213
  Probe

SEQ ID NO: 36986 - DNA, 33 bp, Artificial Sequence; identical to SEQ ID NO: 1215
  Probe

SEQ ID NO: 36987 - DNA, 34 bp, Artificial Sequence; identical to SEQ ID NO: 1216
  Probe

SEQ ID NO: 36988 - DNA, 50 bp, Artificial Sequence; identical to SEQ ID NO: 1219
  Probe

SEQ ID NO: 36989 - DNA, 41 bp, Artificial Sequence
  Probe
gctttacacgcagaaggtcctgggttcgagccccagtggaa

SEQ ID NO: 36990 - DNA, 42 bp, Artificial Sequence
  Probe
gctttacacgcagaaggtcctgggttcgagccccagtggaac

SEQ ID NO: 36991 - DNA, 43 bp, Artificial Sequence
  Probe
gctttacacgcagaaggtcctgggttcgagccccagtggaacc

SEQ ID NO: 36992 - DNA, 44 bp, Artificial Sequence
  Probe
gctttacacgcagaaggtcctgggttcgagccccagtggaacca

SEQ ID NO: 36993 - DNA, 19 bp, Artificial Sequence
  Probe
gctttgcacgtatgaggcc

SEQ ID NO: 36994 - DNA, 20 bp, Artificial Sequence
  Probe
gctttgcacgtatgaggccc

SEQ ID NO: 36995 - DNA, 22 bp, Artificial Sequence
  Probe
gctttgcacgtatgaggccccg

SEQ ID NO: 36996 - DNA, 25 bp, Artificial Sequence
  Probe
gctttgcacgtatgaggccccgggt

SEQ ID NO: 36997 - DNA, 42 bp, Artificial Sequence
  Probe
gctttgcacgtatgaggccccgggttcaatccccggcatctc

SEQ ID NO: 36998 - DNA, 43 bp, Artificial Sequence
  Probe
gctttgcacgtatgaggccccgggttcaatccccggcatctcc

SEQ ID NO: 36999 - DNA, 44 bp, Artificial Sequence
  Probe
gctttgcacgtatgaggccccgggttcaatccccggcatctcca

SEQ ID NO: 37000 - DNA, 22 bp, Artificial Sequence
  Probe
gctttgggtgcgagaggtcccg

SEQ ID NO: 37001 - DNA, 24 bp, Artificial Sequence
  Probe
gctttgggtgcgagaggtcccggg

SEQ ID NO: 37002 - DNA, 25 bp, Artificial Sequence
  Probe
gctttgggtgcgagaggtcccgggt

SEQ ID NO: 37003 - DNA, 41 bp, Artificial Sequence; identical to SEQ ID NO: 6341
  Probe

SEQ ID NO: 37004 - DNA, 28 bp, Artificial Sequence
  Probe
ggagaccggggttcaattccccgacggg

SEQ ID NO: 37005 - DNA, 29 bp, Artificial Sequence
  Probe
ggagaccggggttcaattccccgacgggg

SEQ ID NO: 37006 - DNA, 31 bp, Artificial Sequence; identical to SEQ ID NO: 1236
  Probe

SEQ ID NO: 37007 - DNA, 27 bp, Artificial Sequence
  Probe
ggagaccggggttcgattccccgacgg

SEQ ID NO: 37008 - DNA, 28 bp, Artificial Sequence
  Probe
ggagaccggggttcgattccccgacggg

SEQ ID NO: 37009 - DNA, 29 bp, Artificial Sequence
  Probe
ggagaccggggttcgattccccgacgggg

SEQ ID NO: 37010 - DNA, 30 bp, Artificial Sequence; identical to SEQ ID NO: 1241
  Probe

SEQ ID NO: 37011 - DNA, 31 bp, Artificial Sequence; identical to SEQ ID NO: 1242
  Probe

SEQ ID NO: 37012 - DNA, 24 bp, Artificial Sequence
  Probe
ggattcggcgctctcaccgccgcg

SEQ ID NO: 37013 - DNA, 28 bp, Artificial Sequence
  Probe
ggattcggcgctctcaccgccgcggccc

SEQ ID NO: 37014 - DNA, 28 bp, Artificial Sequence
  Probe
ggattcggcgctttcaccgccgcggccc

SEQ ID NO: 37015 - DNA, 18 bp, Artificial Sequence
  Probe
ggcccataacccagaggt

SEQ ID NO: 37016 - DNA, 20 bp, Artificial Sequence
  Probe
ggcccataacccagaggtcg

SEQ ID NO: 37017 - DNA, 21 bp, Artificial Sequence
  Probe
ggcccataacccagaggtcga

SEQ ID NO: 37018 - DNA, 22 bp, Artificial Sequence
  Probe
ggcccataacccagaggtcgat

SEQ ID NO: 37019 - DNA, 23 bp, Artificial Sequence
  Probe
ggcccataacccagaggtcgatg

SEQ ID NO: 37020 - DNA, 24 bp, Artificial Sequence
  Probe
ggcccataacccagaggtcgatgg

SEQ ID NO: 37021 - DNA, 42 bp, Artificial Sequence
  Probe
ggcccataacccagaggtcgatggatcgaaaccatcctctgc

SEQ ID NO: 37022 - DNA, 43 bp, Artificial Sequence
  Probe
ggcccataacccagaggtcgatggatcgaaaccatcctctgct

SEQ ID NO: 37023 - DNA, 29 bp, Artificial Sequence
  Probe
ggccccatggtgtaatggtcagcactctg

SEQ ID NO: 37024 - DNA, 24 bp, Artificial Sequence
  Probe
ggccccatggtgtaatggttagca

SEQ ID NO: 37025 - DNA, 27 bp, Artificial Sequence
  Probe
ggccccatggtgtaatggttagcactc

SEQ ID NO: 37026 - DNA, 28 bp, Artificial Sequence
  Probe
ggccccatggtgtaatggttagcactct

SEQ ID NO: 37027 - DNA, 29 bp, Artificial Sequence
  Probe
ggccccatggtgtaatggttagcactctg

SEQ ID NO: 37028 - DNA, 30 bp, Artificial Sequence; identical to SEQ ID NO: 8648
  Probe

SEQ ID NO: 37029 - DNA, 31 bp, Artificial Sequence; identical to SEQ ID NO: 21540
  Probe

SEQ ID NO: 37030 - DNA, 36 bp, Artificial Sequence; identical to SEQ ID NO: 1264
  Probe

SEQ ID NO: 37031 - DNA, 50 bp, Artificial Sequence; identical to SEQ ID NO: 6427
  Probe

SEQ ID NO: 37032 - DNA, 29 bp, Artificial Sequence
  Probe
ggccctatagctcaggggttagagcactg

SEQ ID NO: 37033 - DNA, 30 bp, Artificial Sequence; identical to SEQ ID NO: 1267
  Probe

SEQ ID NO: 37034 - DNA, 31 bp, Artificial Sequence; identical to SEQ ID NO: 1268
  Probe

SEQ ID NO: 37035 - DNA, 18 bp, Artificial Sequence
  Probe
ggccggttagctcagtcg

SEQ ID NO: 37036 - DNA, 21 bp, Artificial Sequence
  Probe
ggccggttagctcagtcggct

SEQ ID NO: 37037 - DNA, 28 bp, Artificial Sequence
  Probe
ggcggcccgggttcgactcccggtgtgg

SEQ ID NO: 37038 - DNA, 29 bp, Artificial Sequence
  Probe
ggcggcccgggttcgactcccggtgtggg

SEQ ID NO: 37039 - DNA, 24 bp, Artificial Sequence
  Probe
ggctagctcagtcggtagagcatg

SEQ ID NO: 37040 - DNA, 28 bp, Artificial Sequence
  Probe
ggctagctcagtcggtagagcatgagac

SEQ ID NO: 37041 - DNA, 27 bp, Artificial Sequence
  Probe
ggctagctcagtcggtagagcatggga

SEQ ID NO: 37042 - DNA, 28 bp, Artificial Sequence
  Probe
ggctagctcagtcggtagagcatgggac

SEQ ID NO: 37043 - DNA, 30 bp, Artificial Sequence; identical to SEQ ID NO: 1292
  Probe

SEQ ID NO: 37044 - DNA, 50 bp, Artificial Sequence; identical to SEQ ID NO: 1296
  Probe

SEQ ID NO: 37045 - DNA, 29 bp, Artificial Sequence
  Probe
ggctccatagctcagtggttagagcactg

SEQ ID NO: 37046 - DNA, 30 bp, Artificial Sequence; identical to SEQ ID NO: 13810
  Probe

SEQ ID NO: 37047 - DNA, 31 bp, Artificial Sequence; identical to SEQ ID NO: 1298
  Probe

SEQ ID NO: 37048 - DNA, 26 bp, Artificial Sequence
  Probe
ggctccgtagcttagttggttaaagc

SEQ ID NO: 37049 - DNA, 30 bp, Artificial Sequence; identical to SEQ ID NO: 10704
  Probe

SEQ ID NO: 37050 - DNA, 32 bp, Artificial Sequence; identical to SEQ ID NO: 1304
  Probe

SEQ ID NO: 37051 - DNA, 33 bp, Artificial Sequence; identical to SEQ ID NO: 1306
  Probe

SEQ ID NO: 37052 - DNA, 34 bp, Artificial Sequence; identical to SEQ ID NO: 6500
  Probe

SEQ ID NO: 37053 - DNA, 34 bp, Artificial Sequence; identical to SEQ ID NO: 32308
  Probe

SEQ ID NO: 37054 - DNA, 30 bp, Artificial Sequence; identical to SEQ ID NO: 8665
  Probe

SEQ ID NO: 37055 - DNA, 27 bp, Artificial Sequence
  Probe
ggctcgttggtctagtggtatgattct

SEQ ID NO: 37056 - DNA, 28 bp, Artificial Sequence
  Probe
ggctcgttggtctagtggtatgattctc

SEQ ID NO: 37057 - DNA, 29 bp, Artificial Sequence
  Probe
ggctcgttggtctagtggtatgattctcg

SEQ ID NO: 37058 - DNA, 30 bp, Artificial Sequence; identical to SEQ ID NO: 10725
  Probe

SEQ ID NO: 37059 - DNA, 30 bp, Artificial Sequence; identical to SEQ ID NO: 10734
  Probe

SEQ ID NO: 37060 - DNA, 32 bp, Artificial Sequence
  Probe
ggctctgtggcgcaatggatagcgcattggac

SEQ ID NO: 37061 - DNA, 23 bp, Artificial Sequence
  Probe
ggctgttaaccgaaaggttggtg

SEQ ID NO: 37062 - DNA, 29 bp, Artificial Sequence
  Probe
gggagaccggggttcaattccccgacggg

SEQ ID NO: 37063 - DNA, 30 bp, Artificial Sequence; identical to SEQ ID NO: 1312
  Probe

SEQ ID NO: 37064 - DNA, 32 bp, Artificial Sequence; identical to SEQ ID NO: 6509
  Probe

SEQ ID NO: 37065 - DNA, 29 bp, Artificial Sequence
  Probe
gggagaccggggttcgattccccgacggg

SEQ ID NO: 37066 - DNA, 30 bp, Artificial Sequence; identical to SEQ ID NO: 1315
  Probe

SEQ ID NO: 37067 - DNA, 32 bp, Artificial Sequence; identical to SEQ ID NO: 1317
  Probe

SEQ ID NO: 37068 - DNA, 30 bp, Artificial Sequence; identical to SEQ ID NO: 21761
  Probe

SEQ ID NO: 37069 - DNA, 18 bp, Artificial Sequence
  Probe
ggggatgtagctcagtgg

SEQ ID NO: 37070 - DNA, 19 bp, Artificial Sequence
  Probe
ggggatgtagctcagtggt

SEQ ID NO: 37071 - DNA, 20 bp, Artificial Sequence
  Probe
ggggatgtagctcagtggta

SEQ ID NO: 37072 - DNA, 21 bp, Artificial Sequence
  Probe
ggggatgtagctcagtggtag

SEQ ID NO: 37073 - DNA, 22 bp, Artificial Sequence
  Probe
ggggatgtagctcagtggtaga

SEQ ID NO: 37074 - DNA, 29 bp, Artificial Sequence
  Probe
ggggatgtagctcagtggtagagcgcatg

SEQ ID NO: 37075 - DNA, 30 bp, Artificial Sequence; identical to SEQ ID NO: 1335
  Probe

SEQ ID NO: 37076 - DNA, 23 bp, Artificial Sequence
  Probe
gggggattagctcaaatggtaga

SEQ ID NO: 37077 - DNA, 25 bp, Artificial Sequence
  Probe
gggggcatagctcagtggtagagca

SEQ ID NO: 37078 - DNA, 28 bp, Artificial Sequence
  Probe
gggggcatagctcagtggtagagcattt

SEQ ID NO: 37079 - DNA, 29 bp, Artificial Sequence
  Probe
gggggcatagctcagtggtagagcatttg

SEQ ID NO: 37080 - DNA, 30 bp, Artificial Sequence
  Probe
gggggcatagctcagtggtagagcatttga

SEQ ID NO: 37081 - DNA, 32 bp, Artificial Sequence; identical to SEQ ID NO: 1351
  Probe

SEQ ID NO: 37082 - DNA, 33 bp, Artificial Sequence; identical to SEQ ID NO: 1352
  Probe

SEQ ID NO: 37083 - DNA, 34 bp, Artificial Sequence; identical to SEQ ID NO: 1353
  Probe

SEQ ID NO: 37084 - DNA, 28 bp, Artificial Sequence
  Probe
gggggtatagctcagcggtagagcgcgt

SEQ ID NO: 37085 - DNA, 29 bp, Artificial Sequence
  Probe
gggggtatagctcagcggtagagcgcgtg

SEQ ID NO: 37086 - DNA, 30 bp, Artificial Sequence; identical to SEQ ID NO: 32419
  Probe

SEQ ID NO: 37087 - DNA, 29 bp, Artificial Sequence
  Probe
gggggtatagctcaggggtagagcacttg

SEQ ID NO: 37088 - DNA, 29 bp, Artificial Sequence
  Probe
gggggtatagctcaggggtagagcatttg

SEQ ID NO: 37089 - DNA, 30 bp, Artificial Sequence; identical to SEQ ID NO: 21882
  Probe

SEQ ID NO: 37090 - DNA, 30 bp, Artificial Sequence
  Probe
gggggtatagctcaggtggtagagcatttg

SEQ ID NO: 37091 - DNA, 31 bp, Artificial Sequence; identical to SEQ ID NO: 21886
  Probe

SEQ ID NO: 37092 - DNA, 30 bp, Artificial Sequence; identical to SEQ ID NO: 10810
  Probe

SEQ ID NO: 37093 - DNA, 31 bp, Artificial Sequence; identical to SEQ ID NO: 21895
  Probe

SEQ ID NO: 37094 - DNA, 33 bp, Artificial Sequence; identical to SEQ ID NO: 6590
  Probe

SEQ ID NO: 37095 - DNA, 19 bp, Artificial Sequence
  Probe
gggggtgtagctcagtggt

SEQ ID NO: 37096 - DNA, 21 bp, Artificial Sequence
  Probe
gggggtgtagctcagtggtag

SEQ ID NO: 37097 - DNA, 22 bp, Artificial Sequence
  Probe
gggggtgtagctcagtggtaga

SEQ ID NO: 37098 - DNA, 24 bp, Artificial Sequence
  Probe
gggggtgtagctcagtggtagagc

SEQ ID NO: 37099 - DNA, 29 bp, Artificial Sequence
  Probe
gggggtgtagctcagtggtagagcacatg

SEQ ID NO: 37100 - DNA, 30 bp, Artificial Sequence; identical to SEQ ID NO: 21919
  Probe

SEQ ID NO: 37101 - DNA, 31 bp, Artificial Sequence; identical to SEQ ID NO: 6611
  Probe

SEQ ID NO: 37102 - DNA, 32 bp, Artificial Sequence; identical to SEQ ID NO: 6612
  Probe

SEQ ID NO: 37103 - DNA, 34 bp, Artificial Sequence
  Probe
gggggtgtagctcagtggtagagcacatgctttg

SEQ ID NO: 37104 - DNA, 29 bp, Artificial Sequence
  Probe
gggggtgtagctcagtggtagagcatttg

SEQ ID NO: 37105 - DNA, 28 bp, Artificial Sequence
  Probe
gggggtgtagctcagtggtagagcgcgt

SEQ ID NO: 37106 - DNA, 29 bp, Artificial Sequence
  Probe
gggggtgtagctcagtggtagagcgcgtg

SEQ ID NO: 37107 - DNA, 30 bp, Artificial Sequence; identical to SEQ ID NO: 1367
  Probe

SEQ ID NO: 37108 - DNA, 28 bp, Artificial Sequence
  Probe
gggtatagctcagcggtagagcgcgtgc

SEQ ID NO: 37109 - DNA, 37 bp, Artificial Sequence; identical to SEQ ID NO: 13895
  Probe

SEQ ID NO: 37110 - DNA, 19 bp, Artificial Sequence
  Probe
ggtagcgtggccgagcggt

SEQ ID NO: 37111 - DNA, 20 bp, Artificial Sequence
  Probe
ggtagcgtggccgagcggtc

SEQ ID NO: 37112 - DNA, 22 bp, Artificial Sequence
  Probe
ggtagcgtggccgagcggtcta

SEQ ID NO: 37113 - DNA, 24 bp, Artificial Sequence
  Probe
ggtagcgtggccgagcggtctaag

SEQ ID NO: 37114 - DNA, 33 bp, Artificial Sequence; identical to SEQ ID NO: 6728
  Probe

SEQ ID NO: 37115 - DNA, 33 bp, Artificial Sequence; identical to SEQ ID NO: 1407
  Probe

SEQ ID NO: 37116 - DNA, 27 bp, Artificial Sequence
  Probe
ggtcccatggtgtaatggttagcactc

SEQ ID NO: 37117 - DNA, 28 bp, Artificial Sequence
  Probe
ggtcccatggtgtaatggttagcactct

SEQ ID NO: 37118 - DNA, 29 bp, Artificial Sequence
  Probe
ggtcccatggtgtaatggttagcactctg

SEQ ID NO: 37119 - DNA, 30 bp, Artificial Sequence; identical to SEQ ID NO: 8706
  Probe

SEQ ID NO: 37120 - DNA, 31 bp, Artificial Sequence; identical to SEQ ID NO: 22145
  Probe

SEQ ID NO: 37121 - DNA, 50 bp, Artificial Sequence; identical to SEQ ID NO: 32589
  Probe

SEQ ID NO: 37122 - DNA, 50 bp, Artificial Sequence; identical to SEQ ID NO: 1417
  Probe

SEQ ID NO: 37123 - DNA, 23 bp, Artificial Sequence
  Probe
ggtctagtggttaggattcggcg

SEQ ID NO: 37124 - DNA, 26 bp, Artificial Sequence
  Probe
ggtggtctagtggttaggattcggcg

SEQ ID NO: 37125 - DNA, 25 bp, Artificial Sequence
  Probe
ggtggtgtagtggtgagcacagctg

SEQ ID NO: 37126 - DNA, 20 bp, Artificial Sequence
  Probe
ggtgtagtggtatcatgcaa

SEQ ID NO: 37127 - DNA, 20 bp, Artificial Sequence
  Probe
ggttcaatccccggcacctc

SEQ ID NO: 37128 - DNA, 21 bp, Artificial Sequence
  Probe
ggttcaatccccggcacctcc

SEQ ID NO: 37129 - DNA, 22 bp, Artificial Sequence
  Probe
ggttcaatccccggcacctcca

SEQ ID NO: 37130 - DNA, 19 bp, Artificial Sequence
  Probe
ggttccatagtgtagcggt

SEQ ID NO: 37131 - DNA, 23 bp, Artificial Sequence
  Probe
ggttccatagtgtagcggttatc

SEQ ID NO: 37132 - DNA, 24 bp, Artificial Sequence
  Probe
ggttccatagtgtagcggttatca

SEQ ID NO: 37133 - DNA, 25 bp, Artificial Sequence
  Probe
ggttccatagtgtagcggttatcac

SEQ ID NO: 37134 - DNA, 28 bp, Artificial Sequence
  Probe
ggttccatagtgtagcggttatcacgtc

SEQ ID NO: 37135 - DNA, 29 bp, Artificial Sequence
  Probe
ggttccatagtgtagcggttatcacgtct

SEQ ID NO: 37136 - DNA, 30 bp, Artificial Sequence; identical to SEQ ID NO: 8720
  Probe

SEQ ID NO: 37137 - DNA, 31 bp, Artificial Sequence; identical to SEQ ID NO: 1432
  Probe

SEQ ID NO: 37138 - DNA, 34 bp, Artificial Sequence; identical to SEQ ID NO: 1435
  Probe

SEQ ID NO: 37139 - DNA, 50 bp, Artificial Sequence; identical to SEQ ID NO: 6812
  Probe

SEQ ID NO: 37140 - DNA, 23 bp, Artificial Sequence
  Probe
ggttccatagtgtagtggttatc

SEQ ID NO: 37141 - DNA, 24 bp, Artificial Sequence
  Probe
ggttccatagtgtagtggttatca

SEQ ID NO: 37142 - DNA, 25 bp, Artificial Sequence
  Probe
ggttccatagtgtagtggttatcac

SEQ ID NO: 37143 - DNA, 28 bp, Artificial Sequence
  Probe
ggttccatagtgtagtggttatcacatc

SEQ ID NO: 37144 - DNA, 29 bp, Artificial Sequence
  Probe
ggttccatagtgtagtggttatcacatct

SEQ ID NO: 37145 - DNA, 30 bp, Artificial Sequence; identical to SEQ ID NO: 11085
  Probe

SEQ ID NO: 37146 - DNA, 31 bp, Artificial Sequence; identical to SEQ ID NO: 1443
  Probe

SEQ ID NO: 37147 - DNA, 33 bp, Artificial Sequence; identical to SEQ ID NO: 1445
  Probe

SEQ ID NO: 37148 - DNA, 50 bp, Artificial Sequence; identical to SEQ ID NO: 13981
  Probe

SEQ ID NO: 37149 - DNA, 28 bp, Artificial Sequence
  Probe
ggttccatagtgtagtggttatcacgtc

SEQ ID NO: 37150 - DNA, 29 bp, Artificial Sequence
  Probe
ggttccatagtgtagtggttatcacgtct

SEQ ID NO: 37151 - DNA, 30 bp, Artificial Sequence; identical to SEQ ID NO: 1451
  Probe

SEQ ID NO: 37152 - DNA, 31 bp, Artificial Sequence; identical to SEQ ID NO: 1452
  Probe

SEQ ID NO: 37153 - DNA, 32 bp, Artificial Sequence; identical to SEQ ID NO: 1453
  Probe

SEQ ID NO: 37154 - DNA, 33 bp, Artificial Sequence; identical to SEQ ID NO: 1454
  Probe

SEQ ID NO: 37155 - DNA, 34 bp, Artificial Sequence; identical to SEQ ID NO: 1455
  Probe

SEQ ID NO: 37156 - DNA, 36 bp, Artificial Sequence; identical to SEQ ID NO: 1456
  Probe

SEQ ID NO: 37157 - DNA, 50 bp, Artificial Sequence; identical to SEQ ID NO: 1457
  Probe

SEQ ID NO: 37158 - DNA, 30 bp, Artificial Sequence; identical to SEQ ID NO: 6826
  Probe

SEQ ID NO: 37159 - DNA, 50 bp, Artificial Sequence; identical to SEQ ID NO: 25533
  Probe

SEQ ID NO: 37160 - DNA, 22 bp, Artificial Sequence
  Probe
ggttcgaatcccaccgctgcca

SEQ ID NO: 37161 - DNA, 20 bp, Artificial Sequence
  Probe
ggttcgagccccagtggaac

SEQ ID NO: 37162 - DNA, 21 bp, Artificial Sequence
  Probe
ggttcgatccccagcatctcc

SEQ ID NO: 37163 - DNA, 20 bp, Artificial Sequence
  Probe
ggttcgatccccagtacctc

SEQ ID NO: 37164 - DNA, 21 bp, Artificial Sequence
  Probe
ggttcgatccccagtacctcc

SEQ ID NO: 37165 - DNA, 20 bp, Artificial Sequence
  Probe
ggttcgatccccggcatctc

SEQ ID NO: 37166 - DNA, 21 bp, Artificial Sequence
  Probe
ggttcgatccccggcatctcc

SEQ ID NO: 37167 - DNA, 20 bp, Artificial Sequence
  Probe
ggttcgattctcatagtcct

SEQ ID NO: 37168 - DNA, 21 bp, Artificial Sequence
  Probe
ggttcgattctcatagtccta

SEQ ID NO: 37169 - DNA, 22 bp, Artificial Sequence
  Probe
ggttcgattctcatagtcctag

SEQ ID NO: 37170 - DNA, 20 bp, Artificial Sequence
  Probe
gtaaaccaggggtcgcgagt

SEQ ID NO: 37171 - DNA, 34 bp, Artificial Sequence
  Probe
gtatgaggtcccgggttcgatccccggcatctcc

SEQ ID NO: 37172 - DNA, 37 bp, Artificial Sequence
  Probe
gtcacgcgggagaccggggttcaattccccgacgggg

SEQ ID NO: 37173 - DNA, 35 bp, Artificial Sequence; identical to SEQ ID NO: 14033
  Probe

SEQ ID NO: 37174 - DNA, 36 bp, Artificial Sequence; identical to SEQ ID NO: 14034
  Probe

SEQ ID NO: 37175 - DNA, 37 bp, Artificial Sequence; identical to SEQ ID NO: 14035
  Probe

SEQ ID NO: 37176 - DNA, 28 bp, Artificial Sequence
  Probe
gtcagaggttcaattcctcttcttaaca

SEQ ID NO: 37177 - DNA, 31 bp, Artificial Sequence; identical to SEQ ID NO: 6989
  Probe

SEQ ID NO: 37178 - DNA, 23 bp, Artificial Sequence
  Probe
gtcaggatggccgagtggtctaa

SEQ ID NO: 37179 - DNA, 24 bp, Artificial Sequence
  Probe
gtcaggatggccgagtggtctaag

SEQ ID NO: 37180 - DNA, 25 bp, Artificial Sequence
  Probe
gtcaggatggccgagtggtctaagg

SEQ ID NO: 37181 - DNA, 32 bp, Artificial Sequence; identical to SEQ ID NO: 14044
  Probe

SEQ ID NO: 37182 - DNA, 27 bp, Artificial Sequence
  Probe
gtccttgtagtataaactaatacacca

SEQ ID NO: 37183 - DNA, 28 bp, Artificial Sequence
  Probe
gtccttgtagtataaactaatacaccag

SEQ ID NO: 37184 - DNA, 50 bp, Artificial Sequence; identical to SEQ ID NO: 1489
  Probe

SEQ ID NO: 37185 - DNA, 20 bp, Artificial Sequence
  Probe
gtctagcggttaggattcct

SEQ ID NO: 37186 - DNA, 50 bp, Artificial Sequence
  Probe
gtctagcggttaggattcctggttttcacccaggtggcccgggttcgact

SEQ ID NO: 37187 - DNA, 28 bp, Artificial Sequence
  Probe
gtctcataatctgaaggtcctgagttcg

SEQ ID NO: 37188 - DNA, 20 bp, Artificial Sequence
  Probe
gtctcataatctgaaggtcg

SEQ ID NO: 37189 - DNA, 21 bp, Artificial Sequence
  Probe
gtctcataatctgaaggtcgt

SEQ ID NO: 37190 - DNA, 22 bp, Artificial Sequence
  Probe
gtctcataatctgaaggtcgtg

SEQ ID NO: 37191 - DNA, 23 bp, Artificial Sequence
  Probe
gtctcataatctgaaggtcgtga

SEQ ID NO: 37192 - DNA, 24 bp, Artificial Sequence
  Probe
gtctcataatctgaaggtcgtgag

SEQ ID NO: 37193 - DNA, 25 bp, Artificial Sequence
  Probe
gtctcataatctgaaggtcgtgagt

SEQ ID NO: 37194 - DNA, 23 bp, Artificial Sequence
  Probe
gtcttgtaaaccaggggtcgcga

SEQ ID NO: 37195 - DNA, 24 bp, Artificial Sequence
  Probe
gtcttgtaaaccaggggtcgcgag

SEQ ID NO: 37196 - DNA, 32 bp, Artificial Sequence; identical to SEQ ID NO: 14072
  Probe

SEQ ID NO: 37197 - DNA, 35 bp, Artificial Sequence; identical to SEQ ID NO: 14087
  Probe

SEQ ID NO: 37198 - DNA, 25 bp, Artificial Sequence
  Probe
gtggtctagtggttaggattcggcg

SEQ ID NO: 37199 - DNA, 35 bp, Artificial Sequence; identical to SEQ ID NO: 14107
  Probe

SEQ ID NO: 37200 - DNA, 50 bp, Artificial Sequence
  Probe
gtgtaatggttagcactctggactctgaatccagcgatccgagttcaaat

SEQ ID NO: 37201 - DNA, 29 bp, Artificial Sequence
  Probe
gtgtttgtgggtttaagtcccattggtct

SEQ ID NO: 37202 - DNA, 30 bp, Artificial Sequence; identical to SEQ ID NO: 1519
  Probe

SEQ ID NO: 37203 - DNA, 31 bp, Artificial Sequence; identical to SEQ ID NO: 22919
  Probe

SEQ ID NO: 37204 - DNA, 19 bp, Artificial Sequence
  Probe
gttaaccgaaaggttggtg

SEQ ID NO: 37205 - DNA, 24 bp, Artificial Sequence
  Probe
gttagtatagtggtgagtatcccc

SEQ ID NO: 37206 - DNA, 25 bp, Artificial Sequence
  Probe
gttagtatagtggtgagtatccccg

SEQ ID NO: 37207 - DNA, 18 bp, Artificial Sequence
  Probe
gttcaatccccggcacct

SEQ ID NO: 37208 - DNA, 19 bp, Artificial Sequence
  Probe
gttcaatccccggcacctc

SEQ ID NO: 37209 - DNA, 20 bp, Artificial Sequence
  Probe
gttcaatccccggcacctcc

SEQ ID NO: 37210 - DNA, 24 bp, Artificial Sequence
  Probe
gttcaatccccggcacctccacca

SEQ ID NO: 37211 - DNA, 18 bp, Artificial Sequence
  Probe
gttcaggtcgcagtctcc

SEQ ID NO: 37212 - DNA, 19 bp, Artificial Sequence
  Probe
gttcgatccccagtacctc

SEQ ID NO: 37213 - DNA, 20 bp, Artificial Sequence
  Probe
gttcgatccccagtacctcc

SEQ ID NO: 37214 - DNA, 19 bp, Artificial Sequence
  Probe
gttcgatccccggcacctc

SEQ ID NO: 37215 - DNA, 20 bp, Artificial Sequence
  Probe
gttcgatccccggcacctcc

SEQ ID NO: 37216 - DNA, 19 bp, Artificial Sequence
  Probe
gttcgatccccggcatctc

SEQ ID NO: 37217 - DNA, 20 bp, Artificial Sequence
  Probe
gttcgatccccggcatctcc

SEQ ID NO: 37218 - DNA, 21 bp, Artificial Sequence
  Probe
gttcgatcccgggtttcggca

SEQ ID NO: 37219 - DNA, 50 bp, Artificial Sequence; identical to SEQ ID NO: 1529
  Probe

SEQ ID NO: 37220 - DNA, 31 bp, Artificial Sequence; identical to SEQ ID NO: 7206
  Probe

SEQ ID NO: 37221 - DNA, 50 bp, Artificial Sequence; identical to SEQ ID NO: 7209
  Probe

SEQ ID NO: 37222 - DNA, 34 bp, Artificial Sequence; identical to SEQ ID NO: 1538
  Probe

SEQ ID NO: 37223 - DNA, 35 bp, Artificial Sequence; identical to SEQ ID NO: 1539
  Probe

SEQ ID NO: 37224 - DNA, 36 bp, Artificial Sequence; identical to SEQ ID NO: 1540
  Probe

SEQ ID NO: 37225 - DNA, 50 bp, Artificial Sequence; identical to SEQ ID NO: 7251
  Probe

SEQ ID NO: 37226 - DNA, 23 bp, Artificial Sequence
  Probe
gtttccgtagtgtagcggttatc

SEQ ID NO: 37227 - DNA, 24 bp, Artificial Sequence
  Probe
gtttccgtagtgtagcggttatca

SEQ ID NO: 37228 - DNA, 28 bp, Artificial Sequence
  Probe
gtttccgtagtgtagcggttatcacatt

SEQ ID NO: 37229 - DNA, 29 bp, Artificial Sequence
  Probe
gtttccgtagtgtagcggttatcacattc

SEQ ID NO: 37230 - DNA, 30 bp, Artificial Sequence; identical to SEQ ID NO: 8769
  Probe

SEQ ID NO: 37231 - DNA, 31 bp, Artificial Sequence; identical to SEQ ID NO: 1547
  Probe

SEQ ID NO: 37232 - DNA, 33 bp, Artificial Sequence; identical to SEQ ID NO: 1549
  Probe

SEQ ID NO: 37233 - DNA, 34 bp, Artificial Sequence; identical to SEQ ID NO: 1550
  Probe

SEQ ID NO: 37234 - DNA, 50 bp, Artificial Sequence; identical to SEQ ID NO: 7255
  Probe

SEQ ID NO: 37235 - DNA, 21 bp, Artificial Sequence
  Probe
gtttccgtagtgtagtggtca

SEQ ID NO: 37236 - DNA, 23 bp, Artificial Sequence
  Probe
gtttccgtagtgtagtggtcatc

SEQ ID NO: 37237 - DNA, 24 bp, Artificial Sequence
  Probe
gtttccgtagtgtagtggtcatca

SEQ ID NO: 37238 - DNA, 28 bp, Artificial Sequence
  Probe
gtttccgtagtgtagtggtcatcacgtt

SEQ ID NO: 37239 - DNA, 29 bp, Artificial Sequence
  Probe
gtttccgtagtgtagtggtcatcacgttc

SEQ ID NO: 37240 - DNA, 30 bp, Artificial Sequence; identical to SEQ ID NO: 8772
  Probe

SEQ ID NO: 37241 - DNA, 31 bp, Artificial Sequence; identical to SEQ ID NO: 1559
  Probe

SEQ ID NO: 37242 - DNA, 32 bp, Artificial Sequence; identical to SEQ ID NO: 1560
  Probe

SEQ ID NO: 37243 - DNA, 33 bp, Artificial Sequence; identical to SEQ ID NO: 1561
  Probe

SEQ ID NO: 37244 - DNA, 50 bp, Artificial Sequence; identical to SEQ ID NO: 7277
  Probe

SEQ ID NO: 37245 - DNA, 50 bp, Artificial Sequence; identical to SEQ ID NO: 1564
  Probe

SEQ ID NO: 37246 - DNA, 23 bp, Artificial Sequence
  Probe
gtttccgtagtgtagtggttatt

SEQ ID NO: 37247 - DNA, 29 bp, Artificial Sequence
  Probe
gtttccgtggtgtagtggttatcacattc

SEQ ID NO: 37248 - DNA, 20 bp, Artificial Sequence
  Probe
gttttcacccaggtggcccg

SEQ ID NO: 37249 - DNA, 42 bp, Artificial Sequence
  Probe
gttttcacccaggtggcccgggttcgactcccggtatgggaa

SEQ ID NO: 37250 - DNA, 50 bp, Artificial Sequence; identical to SEQ ID NO: 1568
  Probe

SEQ ID NO: 37251 - DNA, 50 bp, Artificial Sequence; identical to SEQ ID NO: 1569
  Probe

SEQ ID NO: 37252 - DNA, 19 bp, Artificial Sequence
  Probe
taagccagggattgtgggt

SEQ ID NO: 37253 - DNA, 17 bp, Artificial Sequence
  Probe
taatggataaggcattg

SEQ ID NO: 37254 - DNA, 17 bp, Artificial Sequence
  Probe
taatggtcagcactctg

SEQ ID NO: 37255 - DNA, 38 bp, Artificial Sequence
  Probe
tacacgcagaaggtcctgggttcgagccccagtggaac

SEQ ID NO: 37256 - DNA, 18 bp, Artificial Sequence
  Probe
tacctcctcaaagcaata

SEQ ID NO: 37257 - DNA, 50 bp, Artificial Sequence; identical to SEQ ID NO: 1579
  Probe

SEQ ID NO: 37258 - DNA, 50 bp, Artificial Sequence; identical to SEQ ID NO: 1582
  Probe

SEQ ID NO: 37259 - DNA, 49 bp, Artificial Sequence; identical to SEQ ID NO: 1585
  Probe

SEQ ID NO: 37260 - DNA, 50 bp, Artificial Sequence; identical to SEQ ID NO: 1586
  Probe

SEQ ID NO: 37261 - DNA, 29 bp, Artificial Sequence
  Probe
taggatggggtgtgataggtggcacggag

SEQ ID NO: 37262 - DNA, 30 bp, Artificial Sequence; identical to SEQ ID NO: 1592
  Probe

SEQ ID NO: 37263 - DNA, 49 bp, Artificial Sequence; identical to SEQ ID NO: 23495
  Probe

SEQ ID NO: 37264 - DNA, 50 bp, Artificial Sequence; identical to SEQ ID NO: 23496
  Probe

SEQ ID NO: 37265 - DNA, 24 bp, Artificial Sequence
  Probe
tagtatagtggtgagtgtccccgt

SEQ ID NO: 37266 - DNA, 18 bp, Artificial Sequence
  Probe
tagtggtatgattctcgc

SEQ ID NO: 37267 - DNA, 18 bp, Artificial Sequence
  Probe
tagtggtcatcacgttcg

SEQ ID NO: 37268 - DNA, 19 bp, Artificial Sequence
  Probe
tagtggtcatcacgttcgc

SEQ ID NO: 37269 - DNA, 19 bp, Artificial Sequence
  Probe
tagtggttaggattcggcg

SEQ ID NO: 37270 - DNA, 20 bp, Artificial Sequence
  Probe
tagtggttaggattcggcgc

SEQ ID NO: 37271 - DNA, 32 bp, Artificial Sequence; identical to SEQ ID NO: 23548
  Probe

SEQ ID NO: 37272 - DNA, 37 bp, Artificial Sequence; identical to SEQ ID NO: 14220
  Probe

SEQ ID NO: 37273 - DNA, 38 bp, Artificial Sequence; identical to SEQ ID NO: 14221
  Probe

SEQ ID NO: 37274 - DNA, 19 bp, Artificial Sequence
  Probe
tagtggttagtactctgcg

SEQ ID NO: 37275 - DNA, 17 bp, Artificial Sequence
  Probe
tagtggttagtatcccc

SEQ ID NO: 37276 - DNA, 18 bp, Artificial Sequence
  Probe
tagtggttagtatccccg

SEQ ID NO: 37277 - DNA, 18 bp, Artificial Sequence
  Probe
tagtggttatcacgtctg

SEQ ID NO: 37278 - DNA, 42 bp, Artificial Sequence; identical to SEQ ID NO: 23565
  Probe

SEQ ID NO: 37279 - DNA, 50 bp, Artificial Sequence; identical to SEQ ID NO: 1605
  Probe

SEQ ID NO: 37280 - DNA, 18 bp, Artificial Sequence
  Probe
tcaatccccagcacctcc

SEQ ID NO: 37281 - DNA, 18 bp, Artificial Sequence
  Probe
tcaatccccggcacctcc

SEQ ID NO: 37282 - DNA, 19 bp, Artificial Sequence
  Probe
tcaatccccggcacctcca

SEQ ID NO: 37283 - DNA, 22 bp, Artificial Sequence
  Probe
tcaatccccggcacctccacca

SEQ ID NO: 37284 - DNA, 50 bp, Artificial Sequence; identical to SEQ ID NO: 1610
  Probe

SEQ ID NO: 37285 - DNA, 18 bp, Artificial Sequence
  Probe
tcacacgcgaaaggtccc

SEQ ID NO: 37286 - DNA, 20 bp, Artificial Sequence
  Probe
tcacacgcgaaaggtccccg

SEQ ID NO: 37287 - DNA, 21 bp, Artificial Sequence
  Probe
tcacacgcgaaaggtccccgg

SEQ ID NO: 37288 - DNA, 22 bp, Artificial Sequence
  Probe
tcacacgcgaaaggtccccggt

SEQ ID NO: 37289 - DNA, 37 bp, Artificial Sequence
  Probe
tcaccgccgcggcccgggttcgattcccggtcaggga

SEQ ID NO: 37290 - DNA, 18 bp, Artificial Sequence
  Probe
tcacgcgggagaccgggg

SEQ ID NO: 37291 - DNA, 19 bp, Artificial Sequence
  Probe
tcacgcgggagaccggggt

SEQ ID NO: 37292 - DNA, 35 bp, Artificial Sequence; identical to SEQ ID NO: 7687
  Probe

SEQ ID NO: 37293 - DNA, 36 bp, Artificial Sequence; identical to SEQ ID NO: 1616
  Probe

SEQ ID NO: 37294 - DNA, 37 bp, Artificial Sequence; identical to SEQ ID NO: 7688
  Probe

SEQ ID NO: 37295 - DNA, 38 bp, Artificial Sequence; identical to SEQ ID NO: 1617
  Probe

SEQ ID NO: 37296 - DNA, 32 bp, Artificial Sequence; identical to SEQ ID NO: 1618
  Probe

SEQ ID NO: 37297 - DNA, 34 bp, Artificial Sequence; identical to SEQ ID NO: 1620
  Probe

SEQ ID NO: 37298 - DNA, 35 bp, Artificial Sequence; identical to SEQ ID NO: 1621
  Probe

SEQ ID NO: 37299 - DNA, 36 bp, Artificial Sequence; identical to SEQ ID NO: 1622
  Probe

SEQ ID NO: 37300 - DNA, 37 bp, Artificial Sequence; identical to SEQ ID NO: 7698
  Probe

SEQ ID NO: 37301 - DNA, 38 bp, Artificial Sequence; identical to SEQ ID NO: 1623
  Probe

SEQ ID NO: 37302 - DNA, 18 bp, Artificial Sequence
  Probe
tcagaagattccaggttc

SEQ ID NO: 37303 - DNA, 19 bp, Artificial Sequence
  Probe
tcagaagattctaggttcg

SEQ ID NO: 37304 - DNA, 31 bp, Artificial Sequence; identical to SEQ ID NO: 23721
  Probe

SEQ ID NO: 37305 - DNA, 18 bp, Artificial Sequence
  Probe
tccaagcagttgacccgg

SEQ ID NO: 37306 - DNA, 23 bp, Artificial Sequence
  Probe
tccaatggggtttccccgcacag

SEQ ID NO: 37307 - DNA, 18 bp, Artificial Sequence
  Probe
tccagcgatccgagttca

SEQ ID NO: 37308 - DNA, 24 bp, Artificial Sequence
  Probe
tccagcgatccgagttcaaatctc

SEQ ID NO: 37309 - DNA, 32 bp, Artificial Sequence; identical to SEQ ID NO: 23791
  Probe

SEQ ID NO: 37310 - DNA, 33 bp, Artificial Sequence; identical to SEQ ID NO: 23792
  Probe

SEQ ID NO: 37311 - DNA, 21 bp, Artificial Sequence
  Probe
tccagtctcttcgggggcgtg

SEQ ID NO: 37312 - DNA, 26 bp, Artificial Sequence
  Probe
tccatagtgtagtggttatcacgtct

SEQ ID NO: 37313 - DNA, 20 bp, Artificial Sequence
  Probe
tccattggggtctccccgcg

SEQ ID NO: 37314 - DNA, 20 bp, Artificial Sequence
  Probe
tccattggggtttccccgcg

SEQ ID NO: 37315 - DNA, 22 bp, Artificial Sequence
  Probe
tccattggggtttccccgcgca

SEQ ID NO: 37316 - DNA, 23 bp, Artificial Sequence
  Probe
tccattggggtttccccgcgcag

SEQ ID NO: 37317 - DNA, 24 bp, Artificial Sequence
  Probe
tccattggggtttccccgcgcagg

SEQ ID NO: 37318 - DNA, 25 bp, Artificial Sequence
  Probe
tccattggggtttccccgcgcaggt

SEQ ID NO: 37319 - DNA, 23 bp, Artificial Sequence
  Probe
tcccacatggtctagcggttagg

SEQ ID NO: 37320 - DNA, 24 bp, Artificial Sequence
  Probe
tcccacatggtctagcggttagga

SEQ ID NO: 37321 - DNA, 25 bp, Artificial Sequence
  Probe
tcccacatggtctagcggttaggat

SEQ ID NO: 37322 - DNA, 26 bp, Artificial Sequence
  Probe
tcccacatggtctagcggttaggatt

SEQ ID NO: 37323 - DNA, 27 bp, Artificial Sequence
  Probe
tcccacatggtctagcggttaggattc

SEQ ID NO: 37324 - DNA, 28 bp, Artificial Sequence
  Probe
tcccacatggtctagcggttaggattcc

SEQ ID NO: 37325 - DNA, 29 bp, Artificial Sequence
  Probe
tcccacatggtctagcggttaggattcct

SEQ ID NO: 37326 - DNA, 30 bp, Artificial Sequence; identical to SEQ ID NO: 1643
  Probe

SEQ ID NO: 37327 - DNA, 31 bp, Artificial Sequence; identical to SEQ ID NO: 1644
  Probe

SEQ ID NO: 37328 - DNA, 32 bp, Artificial Sequence; identical to SEQ ID NO: 1645
  Probe

SEQ ID NO: 37329 - DNA, 33 bp, Artificial Sequence; identical to SEQ ID NO: 1646
  Probe

SEQ ID NO: 37330 - DNA, 34 bp, Artificial Sequence; identical to SEQ ID NO: 1647
  Probe

SEQ ID NO: 37331 - DNA, 35 bp, Artificial Sequence; identical to SEQ ID NO: 1648
  Probe

SEQ ID NO: 37332 - DNA, 36 bp, Artificial Sequence; identical to SEQ ID NO: 1649
  Probe

SEQ ID NO: 37333 - DNA, 50 bp, Artificial Sequence; identical to SEQ ID NO: 7798
  Probe

SEQ ID NO: 37334 - DNA, 25 bp, Artificial Sequence
  Probe
tcccatatggtctagcggttaggat

SEQ ID NO: 37335 - DNA, 26 bp, Artificial Sequence
  Probe
tcccatatggtctagcggttaggatt

SEQ ID NO: 37336 - DNA, 27 bp, Artificial Sequence
  Probe
tcccatatggtctagcggttaggattc

SEQ ID NO: 37337 - DNA, 28 bp, Artificial Sequence
  Probe
tcccatatggtctagcggttaggattcc

SEQ ID NO: 37338 - DNA, 29 bp, Artificial Sequence
  Probe
tcccatatggtctagcggttaggattcct

SEQ ID NO: 37339 - DNA, 30 bp, Artificial Sequence; identical to SEQ ID NO: 1659
  Probe

SEQ ID NO: 37340 - DNA, 31 bp, Artificial Sequence; identical to SEQ ID NO: 1660
  Probe

SEQ ID NO: 37341 - DNA, 33 bp, Artificial Sequence; identical to SEQ ID NO: 1662
  Probe

SEQ ID NO: 37342 - DNA, 34 bp, Artificial Sequence; identical to SEQ ID NO: 1663
  Probe

SEQ ID NO: 37343 - DNA, 35 bp, Artificial Sequence; identical to SEQ ID NO: 1664
  Probe

SEQ ID NO: 37344 - DNA, 36 bp, Artificial Sequence; identical to SEQ ID NO: 1665
  Probe

SEQ ID NO: 37345 - DNA, 50 bp, Artificial Sequence; identical to SEQ ID NO: 7805
  Probe

SEQ ID NO: 37346 - DNA, 17 bp, Artificial Sequence
  Probe
tccccggcacctccacc

SEQ ID NO: 37347 - DNA, 18 bp, Artificial Sequence
  Probe
tccccggcacctccacca

SEQ ID NO: 37348 - DNA, 31 bp, Artificial Sequence; identical to SEQ ID NO: 1671
  Probe

SEQ ID NO: 37349 - DNA, 32 bp, Artificial Sequence; identical to SEQ ID NO: 1672
  Probe

SEQ ID NO: 37350 - DNA, 33 bp, Artificial Sequence; identical to SEQ ID NO: 1673
  Probe

SEQ ID NO: 37351 - DNA, 34 bp, Artificial Sequence; identical to SEQ ID NO: 1674
  Probe

SEQ ID NO: 37352 - DNA, 35 bp, Artificial Sequence; identical to SEQ ID NO: 1675
  Probe

SEQ ID NO: 37353 - DNA, 36 bp, Artificial Sequence; identical to SEQ ID NO: 1676
  Probe

SEQ ID NO: 37354 - DNA, 49 bp, Artificial Sequence; identical to SEQ ID NO: 7858
  Probe

SEQ ID NO: 37355 - DNA, 50 bp, Artificial Sequence; identical to SEQ ID NO: 1678
  Probe

SEQ ID NO: 37356 - DNA, 31 bp, Artificial Sequence; identical to SEQ ID NO: 1679
  Probe

SEQ ID NO: 37357 - DNA, 32 bp, Artificial Sequence; identical to SEQ ID NO: 1680
  Probe

SEQ ID NO: 37358 - DNA, 33 bp, Artificial Sequence; identical to SEQ ID NO: 1681
  Probe

SEQ ID NO: 37359 - DNA, 34 bp, Artificial Sequence; identical to SEQ ID NO: 1682
  Probe

SEQ ID NO: 37360 - DNA, 35 bp, Artificial Sequence; identical to SEQ ID NO: 1683
  Probe

SEQ ID NO: 37361 - DNA, 36 bp, Artificial Sequence; identical to SEQ ID NO: 1684
  Probe

SEQ ID NO: 37362 - DNA, 37 bp, Artificial Sequence; identical to SEQ ID NO: 1685
  Probe

SEQ ID NO: 37363 - DNA, 44 bp, Artificial Sequence; identical to SEQ ID NO: 7873
  Probe

SEQ ID NO: 37364 - DNA, 46 bp, Artificial Sequence; identical to SEQ ID NO: 7875
  Probe

SEQ ID NO: 37365 - DNA, 50 bp, Artificial Sequence; identical to SEQ ID NO: 1691
  Probe

SEQ ID NO: 37366 - DNA, 33 bp, Artificial Sequence
  Probe
tccgagaggtcccgggttcaaatcccggacgag

SEQ ID NO: 37367 - DNA, 34 bp, Artificial Sequence
  Probe
tccgagaggtcccgggttcaaatcccggacgagc

SEQ ID NO: 37368 - DNA, 22 bp, Artificial Sequence
  Probe
tcctcgttagtatagtggtgag

SEQ ID NO: 37369 - DNA, 23 bp, Artificial Sequence
  Probe
tcctcgttagtatagtggtgagt

SEQ ID NO: 37370 - DNA, 25 bp, Artificial Sequence
  Probe
tcctcgttagtatagtggtgagtat

SEQ ID NO: 37371 - DNA, 26 bp, Artificial Sequence
  Probe
tcctcgttagtatagtggtgagtatc

SEQ ID NO: 37372 - DNA, 27 bp, Artificial Sequence
  Probe
tcctcgttagtatagtggtgagtatcc

SEQ ID NO: 37373 - DNA, 28 bp, Artificial Sequence
  Probe
tcctcgttagtatagtggtgagtatccc

SEQ ID NO: 37374 - DNA, 29 bp, Artificial Sequence
  Probe
tcctcgttagtatagtggtgagtatcccc

SEQ ID NO: 37375 - DNA, 30 bp, Artificial Sequence; identical to SEQ ID NO: 1701
  Probe

SEQ ID NO: 37376 - DNA, 31 bp, Artificial Sequence; identical to SEQ ID NO: 1702
  Probe

SEQ ID NO: 37377 - DNA, 32 bp, Artificial Sequence; identical to SEQ ID NO: 1703
  Probe

SEQ ID NO: 37378 - DNA, 33 bp, Artificial Sequence; identical to SEQ ID NO: 1704
  Probe

SEQ ID NO: 37379 - DNA, 34 bp, Artificial Sequence; identical to SEQ ID NO: 1705
  Probe

SEQ ID NO: 37380 - DNA, 35 bp, Artificial Sequence; identical to SEQ ID NO: 1706
  Probe

SEQ ID NO: 37381 - DNA, 36 bp, Artificial Sequence; identical to SEQ ID NO: 1707
  Probe

SEQ ID NO: 37382 - DNA, 50 bp, Artificial Sequence; identical to SEQ ID NO: 1711
  Probe

SEQ ID NO: 37383 - DNA, 28 bp, Artificial Sequence
  Probe
tcctcgttagtatagtggttagtatccc

SEQ ID NO: 37384 - DNA, 29 bp, Artificial Sequence
  Probe
tcctcgttagtatagtggttagtatcccc

SEQ ID NO: 37385 - DNA, 30 bp, Artificial Sequence; identical to SEQ ID NO: 11933
  Probe

SEQ ID NO: 37386 - DNA, 31 bp, Artificial Sequence
  Probe
tcctcgttagtatagtggttagtatccccgc

SEQ ID NO: 37387 - DNA, 34 bp, Artificial Sequence; identical to SEQ ID NO: 1716
  Probe

SEQ ID NO: 37388 - DNA, 50 bp, Artificial Sequence; identical to SEQ ID NO: 7930
  Probe

SEQ ID NO: 37389 - DNA, 18 bp, Artificial Sequence
  Probe
tcgatccccagtacctcc

SEQ ID NO: 37390 - DNA, 18 bp, Artificial Sequence
  Probe
tcgatccccggcatctcc

SEQ ID NO: 37391 - DNA, 22 bp, Artificial Sequence
  Probe
tcgggtgcgagaggtcccgggt

SEQ ID NO: 37392 - DNA, 18 bp, Artificial Sequence
  Probe
tctcaccgccgcggcccg

SEQ ID NO: 37393 - DNA, 27 bp, Artificial Sequence
  Probe
tctcataatctgaaggtcctgagttcg

SEQ ID NO: 37394 - DNA, 42 bp, Artificial Sequence
  Probe
tctcataatctgaaggtcctgagttcgaacctcagagggggc

SEQ ID NO: 37395 - DNA, 43 bp, Artificial Sequence
  Probe
tctcataatctgaaggtcctgagttcgaacctcagagggggca

SEQ ID NO: 37396 - DNA, 19 bp, Artificial Sequence
  Probe
tctcataatctgaaggtcg

SEQ ID NO: 37397 - DNA, 21 bp, Artificial Sequence
  Probe
tctcataatctgaaggtcgtg

SEQ ID NO: 37398 - DNA, 22 bp, Artificial Sequence
  Probe
tctcataatctgaaggtcgtga

SEQ ID NO: 37399 - DNA, 23 bp, Artificial Sequence
  Probe
tctcataatctgaaggtcgtgag

SEQ ID NO: 37400 - DNA, 24 bp, Artificial Sequence
  Probe
tctcataatctgaaggtcgtgagt

SEQ ID NO: 37401 - DNA, 41 bp, Artificial Sequence
  Probe
tctcataatctgaaggtcgtgagttcgagcctcacacgggg

SEQ ID NO: 37402 - DNA, 42 bp, Artificial Sequence
  Probe
tctcataatctgaaggtcgtgagttcgagcctcacacggggc

SEQ ID NO: 37403 - DNA, 41 bp, Artificial Sequence
  Probe
tctcataatctgaaggtcgtgagttcgatcctcacacgggg

SEQ ID NO: 37404 - DNA, 42 bp, Artificial Sequence
  Probe
tctcataatctgaaggtcgtgagttcgatcctcacacggggc

SEQ ID NO: 37405 - DNA, 43 bp, Artificial Sequence
  Probe
tctcataatctgaaggtcgtgagttcgatcctcacacggggca

SEQ ID NO: 37406 - DNA, 18 bp, Artificial Sequence
  Probe
tctgaatccagcgatccg

SEQ ID NO: 37407 - DNA, 20 bp, Artificial Sequence
  Probe
tctgaatccagcgatccgag

SEQ ID NO: 37408 - DNA, 33 bp, Artificial Sequence; identical to SEQ ID NO: 8013
  Probe

SEQ ID NO: 37409 - DNA, 32 bp, Artificial Sequence; identical to SEQ ID NO: 24159
  Probe

SEQ ID NO: 37410 - DNA, 18 bp, Artificial Sequence
  Probe
tgaatccagcgatccgag

SEQ ID NO: 37411 - DNA, 30 bp, Artificial Sequence
  Probe
tgaggccccgggttcgatccccggcatctc

SEQ ID NO: 37412 - DNA, 31 bp, Artificial Sequence
  Probe
tgaggccccgggttcgatccccggcatctcc

SEQ ID NO: 37413 - DNA, 37 bp, Artificial Sequence
  Probe
tgccacgcgggaggcccgggttcgattcccggcccat

SEQ ID NO: 37414 - DNA, 38 bp, Artificial Sequence
  Probe
tgccacgcgggaggcccgggttcgattcccggcccatg

SEQ ID NO: 37415 - DNA, 18 bp, Artificial Sequence
  Probe
tgcgagaggtcccgggtt

SEQ ID NO: 37416 - DNA, 33 bp, Artificial Sequence; identical to SEQ ID NO: 14385
  Probe

SEQ ID NO: 37417 - DNA, 34 bp, Artificial Sequence; identical to SEQ ID NO: 24310
  Probe

SEQ ID NO: 37418 - DNA, 35 bp, Artificial Sequence
  Probe
tgcgagaggtcccgggttcaaatcccggacgagcc

SEQ ID NO: 37419 - DNA, 25 bp, Artificial Sequence
  Probe
tgggtggttcagtggtagaattctc

SEQ ID NO: 37420 - DNA, 26 bp, Artificial Sequence
  Probe
tgggtggttcagtggtagaattctcg

SEQ ID NO: 37421 - DNA, 27 bp, Artificial Sequence
  Probe
tgggtggttcagtggtagaattctcgc

SEQ ID NO: 37422 - DNA, 22 bp, Artificial Sequence
  Probe
tggtctagcggttaggattcct

SEQ ID NO: 37423 - DNA, 23 bp, Artificial Sequence
  Probe
tggtctagcggttaggattcctg

SEQ ID NO: 37424 - DNA, 24 bp, Artificial Sequence
  Probe
tggtctagcggttaggattcctgg

SEQ ID NO: 37425 - DNA, 24 bp, Artificial Sequence
  Probe
tggtctagtggttaggattcggcg

SEQ ID NO: 37426 - DNA, 27 bp, Artificial Sequence
  Probe
tggtggtctagtggttaggattcggcg

SEQ ID NO: 37427 - DNA, 21 bp, Artificial Sequence
  Probe
tggtgtagtggtatcatgcaa

SEQ ID NO: 37428 - DNA, 18 bp, Artificial Sequence
  Probe
tggttaggattcggcgct

SEQ ID NO: 37429 - DNA, 22 bp, Artificial Sequence
  Probe
tggttaggattcggcgctctca

SEQ ID NO: 37430 - DNA, 34 bp, Artificial Sequence; identical to SEQ ID NO: 14437
  Probe

SEQ ID NO: 37431 - DNA, 35 bp, Artificial Sequence; identical to SEQ ID NO: 24447
  Probe

SEQ ID NO: 37432 - DNA, 35 bp, Artificial Sequence
  Probe
tgtatgaggtcccgggttcgatccccggcatctcc

SEQ ID NO: 37433 - DNA, 36 bp, Artificial Sequence; identical to SEQ ID NO: 24495
  Probe

SEQ ID NO: 37434 - DNA, 20 bp, Artificial Sequence
  Probe
tgtcacgcgggagaccgggg

SEQ ID NO: 37435 - DNA, 21 bp, Artificial Sequence
  Probe
tgtcacgcgggagaccggggt

SEQ ID NO: 37436 - DNA, 22 bp, Artificial Sequence
  Probe
tgtcacgcgggagaccggggtt

SEQ ID NO: 37437 - DNA, 37 bp, Artificial Sequence; identical to SEQ ID NO: 14448
  Probe

SEQ ID NO: 37438 - DNA, 38 bp, Artificial Sequence; identical to SEQ ID NO: 24509
  Probe

SEQ ID NO: 37439 - DNA, 24 bp, Artificial Sequence
  Probe
tgtcacgcgggagaccggggttcg

SEQ ID NO: 37440 - DNA, 36 bp, Artificial Sequence; identical to SEQ ID NO: 14453
  Probe

SEQ ID NO: 37441 - DNA, 37 bp, Artificial Sequence; identical to SEQ ID NO: 14454
  Probe

SEQ ID NO: 37442 - DNA, 38 bp, Artificial Sequence; identical to SEQ ID NO: 14455
  Probe

SEQ ID NO: 37443 - DNA, 33 bp, Artificial Sequence
  Probe
tgtgagaggtcccgggttcaaatcccggacgag

SEQ ID NO: 37444 - DNA, 20 bp, Artificial Sequence
  Probe
tgttaaccgaaaggttggtg

SEQ ID NO: 37445 - DNA, 38 bp, Artificial Sequence; identical to SEQ ID NO: 24587
  Probe

SEQ ID NO: 37446 - DNA, 39 bp, Artificial Sequence; identical to SEQ ID NO: 24588
  Probe

SEQ ID NO: 37447 - DNA, 19 bp, Artificial Sequence
  Probe
ttcaaatcacgtcggggtc

SEQ ID NO: 37448 - DNA, 18 bp, Artificial Sequence
  Probe
ttcaatccccggcacctc

SEQ ID NO: 37449 - DNA, 19 bp, Artificial Sequence
  Probe
ttcaatccccggcacctcc

SEQ ID NO: 37450 - DNA, 20 bp, Artificial Sequence
  Probe
ttcaatccccggcacctcca

SEQ ID NO: 37451 - DNA, 23 bp, Artificial Sequence
  Probe
ttcaatccccggcacctccacca

SEQ ID NO: 37452 - DNA, 18 bp, Artificial Sequence
  Probe
ttccaagcagttgacccg

SEQ ID NO: 37453 - DNA, 19 bp, Artificial Sequence
  Probe
ttccaagcagttgacccgg

SEQ ID NO: 37454 - DNA, 20 bp, Artificial Sequence
  Probe
ttccaagcagttgacccggg

SEQ ID NO: 37455 - DNA, 19 bp, Artificial Sequence
  Probe
ttcgaatcacgtcggggtc

SEQ ID NO: 37456 - DNA, 19 bp, Artificial Sequence
  Probe
ttcgagccccagtggaacc

SEQ ID NO: 37457 - DNA, 20 bp, Artificial Sequence
  Probe
ttcgagtcccggcggagtcg

SEQ ID NO: 37458 - DNA, 20 bp, Artificial Sequence
  Probe
ttcgagtcccttcgtggtcg

SEQ ID NO: 37459 - DNA, 18 bp, Artificial Sequence
  Probe
ttcgatccccagtacctc

SEQ ID NO: 37460 - DNA, 19 bp, Artificial Sequence
  Probe
ttcgatccccagtacctcc

SEQ ID NO: 37461 - DNA, 18 bp, Artificial Sequence
  Probe
ttcgatccccggcatctc

SEQ ID NO: 37462 - DNA, 19 bp, Artificial Sequence
  Probe
ttcgatccccggcatctcc

SEQ ID NO: 37463 - DNA, 20 bp, Artificial Sequence
  Probe
ttcgatccccggcatctcca

SEQ ID NO: 37464 - DNA, 42 bp, Artificial Sequence
  Probe
tttacacgcagaaggtcctgggttcgagccccagtggaacca

SEQ ID NO: 37465 - DNA, 28 bp, Artificial Sequence
  Probe
tttaggctccagtctcttcgggggcgtg

SEQ ID NO: 37466 - DNA, 41 bp, Artificial Sequence
  Probe
ttttcacccaggcggcccgggttcgactcccggtgtgggaa

SEQ ID NO: 37467 - DNA, 28 bp, Artificial Sequence
  Probe
aaaacatcagattgtgaatctgacaaca

SEQ ID NO: 37468 - DNA, 50 bp, Artificial Sequence; identical to SEQ ID NO: 1818
  Probe

SEQ ID NO: 37469 - DNA, 50 bp, Artificial Sequence; identical to SEQ ID NO: 1830
  Probe

SEQ ID NO: 37470 - DNA, 46 bp, Artificial Sequence
  Probe
aaaagttggtggttcgagcccacccaggaacgcttgttcgagcttt

SEQ ID NO: 37471 - DNA, 50 bp, Artificial Sequence
  Probe
aaaagttggtggttcgagcccacccaggaacgcttgttcgagcttttaaa

SEQ ID NO: 37472 - DNA, 50 bp, Artificial Sequence; identical to SEQ ID NO: 1846
  Probe

SEQ ID NO: 37473 - DNA, 27 bp, Artificial Sequence
  Probe
aaacatcagattgtgaatctgacaaca

SEQ ID NO: 37474 - DNA, 26 bp, Artificial Sequence
  Probe
aaaccatttcataactttgtcaaagt

SEQ ID NO: 37475 - DNA, 50 bp, Artificial Sequence; identical to SEQ ID NO: 1871
  Probe

SEQ ID NO: 37476 - DNA, 35 bp, Artificial Sequence; identical to SEQ ID NO: 1876
  Probe

SEQ ID NO: 37477 - DNA, 27 bp, Artificial Sequence
  Probe
aaacctagccccaaacccactccacct

SEQ ID NO: 37478 - DNA, 45 bp, Artificial Sequence; identical to SEQ ID NO: 1883
  Probe

SEQ ID NO: 37479 - DNA, 50 bp, Artificial Sequence; identical to SEQ ID NO: 1885
  Probe

SEQ ID NO: 37480 - DNA, 50 bp, Artificial Sequence; identical to SEQ ID NO: 1890
  Probe

SEQ ID NO: 37481 - DNA, 34 bp, Artificial Sequence; identical to SEQ ID NO: 1893
  Probe

SEQ ID NO: 37482 - DNA, 35 bp, Artificial Sequence; identical to SEQ ID NO: 1894
  Probe

SEQ ID NO: 37483 - DNA, 38 bp, Artificial Sequence; identical to SEQ ID NO: 1895
  Probe

SEQ ID NO: 37484 - DNA, 41 bp, Artificial Sequence; identical to SEQ ID NO: 1898
  Probe

SEQ ID NO: 37485 - DNA, 17 bp, Artificial Sequence
  Probe
aaagacaccccccacag

SEQ ID NO: 37486 - DNA, 27 bp, Artificial Sequence
  Probe
aaagacaccccccacagtttatgtagc

SEQ ID NO: 37487 - DNA, 28 bp, Artificial Sequence
  Probe
aaagacaccccccacagtttatgtagct

SEQ ID NO: 37488 - DNA, 29 bp, Artificial Sequence
  Probe
aaagacaccccccacagtttatgtagctt

SEQ ID NO: 37489 - DNA, 30 bp, Artificial Sequence; identical to SEQ ID NO: 1907
  Probe

SEQ ID NO: 37490 - DNA, 31 bp, Artificial Sequence; identical to SEQ ID NO: 14583
  Probe

SEQ ID NO: 37491 - DNA, 32 bp, Artificial Sequence; identical to SEQ ID NO: 1908
  Probe

SEQ ID NO: 37492 - DNA, 33 bp, Artificial Sequence; identical to SEQ ID NO: 1909
  Probe

SEQ ID NO: 37493 - DNA, 34 bp, Artificial Sequence; identical to SEQ ID NO: 14586
  Probe

SEQ ID NO: 37494 - DNA, 35 bp, Artificial Sequence; identical to SEQ ID NO: 1910
  Probe

SEQ ID NO: 37495 - DNA, 36 bp, Artificial Sequence; identical to SEQ ID NO: 1911
  Probe

SEQ ID NO: 37496 - DNA, 39 bp, Artificial Sequence; identical to SEQ ID NO: 1914
  Probe

SEQ ID NO: 37497 - DNA, 50 bp, Artificial Sequence; identical to SEQ ID NO: 1918
  Probe

SEQ ID NO: 37498 - DNA, 33 bp, Artificial Sequence; identical to SEQ ID NO: 1926
  Probe

SEQ ID NO: 37499 - DNA, 34 bp, Artificial Sequence; identical to SEQ ID NO: 1927
  Probe

SEQ ID NO: 37500 - DNA, 36 bp, Artificial Sequence; identical to SEQ ID NO: 1929
  Probe

SEQ ID NO: 37501 - DNA, 37 bp, Artificial Sequence; identical to SEQ ID NO: 1930
  Probe

SEQ ID NO: 37502 - DNA, 50 bp, Artificial Sequence; identical to SEQ ID NO: 1962
  Probe

SEQ ID NO: 37503 - DNA, 27 bp, Artificial Sequence
  Probe
aaagctcacaagaactgctaactcatg

SEQ ID NO: 37504 - DNA, 30 bp, Artificial Sequence; identical to SEQ ID NO: 26093
  Probe

SEQ ID NO: 37505 - DNA, 29 bp, Artificial Sequence
  Probe
aaaggtccccggttcgaaaccgggcggaa

SEQ ID NO: 37506 - DNA, 30 bp, Artificial Sequence; identical to SEQ ID NO: 14636
  Probe

SEQ ID NO: 37507 - DNA, 30 bp, Artificial Sequence; identical to SEQ ID NO: 14640
  Probe

SEQ ID NO: 37508 - DNA, 30 bp, Artificial Sequence; identical to SEQ ID NO: 12470
  Probe

SEQ ID NO: 37509 - DNA, 46 bp, Artificial Sequence
  Probe
aaaggttggtggttcgagcccacccagggacgcctctttgagcttt

SEQ ID NO: 37510 - DNA, 45 bp, Artificial Sequence
  Probe
aaaggttggtggttcgagcccacccagggacgcgtggtgactttt

SEQ ID NO: 37511 - DNA, 50 bp, Artificial Sequence
  Probe
aaaggttggtggttcgagcccacccagggacgcttgtttgagcttttaaa

SEQ ID NO: 37512 - DNA, 46 bp, Artificial Sequence
  Probe
aaaggttggtggttcgagcccacccagggacggtcagtgcttcttt

SEQ ID NO: 37513 - DNA, 50 bp, Artificial Sequence; identical to SEQ ID NO: 1989
  Probe

SEQ ID NO: 37514 - DNA, 33 bp, Artificial Sequence; identical to SEQ ID NO: 26122
  Probe

SEQ ID NO: 37515 - DNA, 50 bp, Artificial Sequence; identical to SEQ ID NO: 26127
  Probe

SEQ ID NO: 37516 - DNA, 20 bp, Artificial Sequence
  Probe
aaatagctcagttgggagag

SEQ ID NO: 37517 - DNA, 36 bp, Artificial Sequence; identical to SEQ ID NO: 2000
  Probe

SEQ ID NO: 37518 - DNA, 37 bp, Artificial Sequence; identical to SEQ ID NO: 2001
  Probe

SEQ ID NO: 37519 - DNA, 38 bp, Artificial Sequence; identical to SEQ ID NO: 2002
  Probe

SEQ ID NO: 37520 - DNA, 50 bp, Artificial Sequence; identical to SEQ ID NO: 36
  Probe

SEQ ID NO: 37521 - DNA, 39 bp, Artificial Sequence; identical to SEQ ID NO: 2009
  Probe

SEQ ID NO: 37522 - DNA, 49 bp, Artificial Sequence; identical to SEQ ID NO: 2012
  Probe

SEQ ID NO: 37523 - DNA, 50 bp, Artificial Sequence; identical to SEQ ID NO: 2013
  Probe

SEQ ID NO: 37524 - DNA, 23 bp, Artificial Sequence
  Probe
aacaatggcacggcaaggggctc

SEQ ID NO: 37525 - DNA, 18 bp, Artificial Sequence
  Probe
aacacaaagcacccaact

SEQ ID NO: 37526 - DNA, 20 bp, Artificial Sequence
  Probe
aacacaaagcacccaactta

SEQ ID NO: 37527 - DNA, 22 bp, Artificial Sequence
  Probe
aacacaaagcacccaacttaca

SEQ ID NO: 37528 - DNA, 25 bp, Artificial Sequence
  Probe
aacacaaagcacccaacttacactt

SEQ ID NO: 37529 - DNA, 26 bp, Artificial Sequence
  Probe
aacacaaagcacccaacttacactta

SEQ ID NO: 37530 - DNA, 27 bp, Artificial Sequence
  Probe
aacacaaagcacccaacttacacttag

SEQ ID NO: 37531 - DNA, 30 bp, Artificial Sequence; identical to SEQ ID NO: 2027
  Probe

SEQ ID NO: 37532 - DNA, 31 bp, Artificial Sequence; identical to SEQ ID NO: 2028
  Probe

SEQ ID NO: 37533 - DNA, 32 bp, Artificial Sequence; identical to SEQ ID NO: 2029
  Probe

SEQ ID NO: 37534 - DNA, 33 bp, Artificial Sequence; identical to SEQ ID NO: 2030
  Probe

SEQ ID NO: 37535 - DNA, 34 bp, Artificial Sequence
  Probe
aacacaaagcacccaacttacacttaggagattt

SEQ ID NO: 37536 - DNA, 36 bp, Artificial Sequence; identical to SEQ ID NO: 2031
  Probe

SEQ ID NO: 37537 - DNA, 37 bp, Artificial Sequence; identical to SEQ ID NO: 2032
  Probe

SEQ ID NO: 37538 - DNA, 20 bp, Artificial Sequence
  Probe
aacacctctttacagtgaaa

SEQ ID NO: 37539 - DNA, 21 bp, Artificial Sequence
  Probe
aacacctctttacagtgaaat

SEQ ID NO: 37540 - DNA, 19 bp, Artificial Sequence
  Probe
aacacgcgaaaggtccccg

SEQ ID NO: 37541 - DNA, 20 bp, Artificial Sequence
  Probe
aacacgcgaaaggtccccgg

SEQ ID NO: 37542 - DNA, 21 bp, Artificial Sequence
  Probe
aacacgcgaaaggtccccggt

SEQ ID NO: 37543 - DNA, 31 bp, Artificial Sequence; identical to SEQ ID NO: 2039
  Probe

SEQ ID NO: 37544 - DNA, 36 bp, Artificial Sequence; identical to SEQ ID NO: 26201
  Probe

SEQ ID NO: 37545 - DNA, 28 bp, Artificial Sequence
  Probe
aacagctaaggactgcaaaaccccactc

SEQ ID NO: 37546 - DNA, 29 bp, Artificial Sequence
  Probe
aacagctaaggactgcaaaaccccactct

SEQ ID NO: 37547 - DNA, 29 bp, Artificial Sequence
  Probe
aacagctatccattggtcttaggccccaa

SEQ ID NO: 37548 - DNA, 50 bp, Artificial Sequence; identical to SEQ ID NO: 2044
  Probe

SEQ ID NO: 37549 - DNA, 33 bp, Artificial Sequence; identical to SEQ ID NO: 2047
  Probe

SEQ ID NO: 37550 - DNA, 39 bp, Artificial Sequence; identical to SEQ ID NO: 2051
  Probe

SEQ ID NO: 37551 - DNA, 29 bp, Artificial Sequence
  Probe
aaccaaaacatcagattgtgaatctgaca

SEQ ID NO: 37552 - DNA, 32 bp, Artificial Sequence; identical to SEQ ID NO: 2065
  Probe

SEQ ID NO: 37553 - DNA, 35 bp, Artificial Sequence; identical to SEQ ID NO: 14768
  Probe

SEQ ID NO: 37554 - DNA, 49 bp, Artificial Sequence; identical to SEQ ID NO: 46
  Probe

SEQ ID NO: 37555 - DNA, 18 bp, Artificial Sequence
  Probe
aaccaacacctctttaca

SEQ ID NO: 37556 - DNA, 21 bp, Artificial Sequence
  Probe
aaccaacacctctttacagtg

SEQ ID NO: 37557 - DNA, 25 bp, Artificial Sequence
  Probe
aaccaacacctctttacagtgaaat

SEQ ID NO: 37558 - DNA, 39 bp, Artificial Sequence; identical to SEQ ID NO: 2079
  Probe

SEQ ID NO: 37559 - DNA, 39 bp, Artificial Sequence; identical to SEQ ID NO: 2080
  Probe

SEQ ID NO: 37560 - DNA, 23 bp, Artificial Sequence
  Probe
aaccgagcgtccaagctctttcc

SEQ ID NO: 37561 - DNA, 24 bp, Artificial Sequence
  Probe
aaccgagcgtccaagctctttcca

SEQ ID NO: 37562 - DNA, 25 bp, Artificial Sequence
  Probe
aaccgagcgtccaagctctttccat

SEQ ID NO: 37563 - DNA, 26 bp, Artificial Sequence
  Probe
aaccgagcgtccaagctctttccatt

SEQ ID NO: 37564 - DNA, 27 bp, Artificial Sequence
  Probe
aaccgagcgtccaagctctttccattt

SEQ ID NO: 37565 - DNA, 28 bp, Artificial Sequence
  Probe
aaccgagcgtccaagctctttccatttt

SEQ ID NO: 37566 - DNA, 29 bp, Artificial Sequence
  Probe
aaccgagcgtccaagctctttccattttt

SEQ ID NO: 37567 - DNA, 33 bp, Artificial Sequence; identical to SEQ ID NO: 2103
  Probe

SEQ ID NO: 37568 - DNA, 34 bp, Artificial Sequence; identical to SEQ ID NO: 2104
  Probe

SEQ ID NO: 37569 - DNA, 18 bp, Artificial Sequence
  Probe
aaccgggcggaaacacct

SEQ ID NO: 37570 - DNA, 20 bp, Artificial Sequence
  Probe
aaccgggcggaaacacgttt

SEQ ID NO: 37571 - DNA, 26 bp, Artificial Sequence
  Probe
aacctagccccaaacccactccacct

SEQ ID NO: 37572 - DNA, 26 bp, Artificial Sequence
  Probe
aacctcagagggggcagctgccattt

SEQ ID NO: 37573 - DNA, 50 bp, Artificial Sequence; identical to SEQ ID NO: 2121
  Probe

SEQ ID NO: 37574 - DNA, 50 bp, Artificial Sequence; identical to SEQ ID NO: 2125
  Probe

SEQ ID NO: 37575 - DNA, 21 bp, Artificial Sequence
  Probe
aacgcgggttcgattcccggg

SEQ ID NO: 37576 - DNA, 33 bp, Artificial Sequence; identical to SEQ ID NO: 2142
  Probe

SEQ ID NO: 37577 - DNA, 34 bp, Artificial Sequence; identical to SEQ ID NO: 2143
  Probe

SEQ ID NO: 37578 - DNA, 35 bp, Artificial Sequence; identical to SEQ ID NO: 2144
  Probe

SEQ ID NO: 37579 - DNA, 36 bp, Artificial Sequence; identical to SEQ ID NO: 2145
  Probe

SEQ ID NO: 37580 - DNA, 37 bp, Artificial Sequence; identical to SEQ ID NO: 2146
  Probe

SEQ ID NO: 37581 - DNA, 38 bp, Artificial Sequence; identical to SEQ ID NO: 2147
  Probe

SEQ ID NO: 37582 - DNA, 24 bp, Artificial Sequence
  Probe
aactgctaactcatgcccccatgt

SEQ ID NO: 37583 - DNA, 42 bp, Artificial Sequence; identical to SEQ ID NO: 2161
  Probe

SEQ ID NO: 37584 - DNA, 46 bp, Artificial Sequence; identical to SEQ ID NO: 2165
  Probe

SEQ ID NO: 37585 - DNA, 50 bp, Artificial Sequence; identical to SEQ ID NO: 2167
  Probe

SEQ ID NO: 37586 - DNA, 38 bp, Artificial Sequence; identical to SEQ ID NO: 61
  Probe

SEQ ID NO: 37587 - DNA, 50 bp, Artificial Sequence; identical to SEQ ID NO: 2180
  Probe

SEQ ID NO: 37588 - DNA, 20 bp, Artificial Sequence
  Probe
aacttaacttgaccgctctg

SEQ ID NO: 37589 - DNA, 24 bp, Artificial Sequence
  Probe
aacttaacttgaccgctctgagct

SEQ ID NO: 37590 - DNA, 22 bp, Artificial Sequence
  Probe
aacttacacttaggagatttca

SEQ ID NO: 37591 - DNA, 23 bp, Artificial Sequence
  Probe
aacttacacttaggagatttcaa

SEQ ID NO: 37592 - DNA, 36 bp, Artificial Sequence; identical to SEQ ID NO: 2188
  Probe

SEQ ID NO: 37593 - DNA, 38 bp, Artificial Sequence; identical to SEQ ID NO: 2190
  Probe

SEQ ID NO: 37594 - DNA, 44 bp, Artificial Sequence; identical to SEQ ID NO: 2194
  Probe

SEQ ID NO: 37595 - DNA, 45 bp, Artificial Sequence; identical to SEQ ID NO: 2195
  Probe

SEQ ID NO: 37596 - DNA, 46 bp, Artificial Sequence; identical to SEQ ID NO: 2196
  Probe

SEQ ID NO: 37597 - DNA, 50 bp, Artificial Sequence; identical to SEQ ID NO: 2197
  Probe

SEQ ID NO: 37598 - DNA, 45 bp, Artificial Sequence; identical to SEQ ID NO: 2203
  Probe

SEQ ID NO: 37599 - DNA, 31 bp, Artificial Sequence; identical to SEQ ID NO: 65
  Probe

SEQ ID NO: 37600 - DNA, 32 bp, Artificial Sequence; identical to SEQ ID NO: 2206
  Probe

SEQ ID NO: 37601 - DNA, 33 bp, Artificial Sequence; identical to SEQ ID NO: 2207
  Probe

SEQ ID NO: 37602 - DNA, 34 bp, Artificial Sequence; identical to SEQ ID NO: 2208
  Probe

SEQ ID NO: 37603 - DNA, 35 bp, Artificial Sequence; identical to SEQ ID NO: 2209
  Probe

SEQ ID NO: 37604 - DNA, 36 bp, Artificial Sequence; identical to SEQ ID NO: 2210
  Probe

SEQ ID NO: 37605 - DNA, 37 bp, Artificial Sequence; identical to SEQ ID NO: 2211
  Probe

SEQ ID NO: 37606 - DNA, 18 bp, Artificial Sequence
  Probe
aagaactgctaactcatg

SEQ ID NO: 37607 - DNA, 50 bp, Artificial Sequence; identical to SEQ ID NO: 2230
  Probe

SEQ ID NO: 37608 - DNA, 31 bp, Artificial Sequence; identical to SEQ ID NO: 2232
  Probe

SEQ ID NO: 37609 - DNA, 32 bp, Artificial Sequence; identical to SEQ ID NO: 2233
  Probe

SEQ ID NO: 37610 - DNA, 27 bp, Artificial Sequence
  Probe
aagacaccccccacagtttatgtagct

SEQ ID NO: 37611 - DNA, 29 bp, Artificial Sequence
  Probe
aagacaccccccacagtttatgtagctta

SEQ ID NO: 37612 - DNA, 31 bp, Artificial Sequence; identical to SEQ ID NO: 2236
  Probe

SEQ ID NO: 37613 - DNA, 32 bp, Artificial Sequence; identical to SEQ ID NO: 2237
  Probe

SEQ ID NO: 37614 - DNA, 33 bp, Artificial Sequence; identical to SEQ ID NO: 2238
  Probe

SEQ ID NO: 37615 - DNA, 34 bp, Artificial Sequence; identical to SEQ ID NO: 2239
  Probe

SEQ ID NO: 37616 - DNA, 31 bp, Artificial Sequence; identical to SEQ ID NO: 2247
  Probe

SEQ ID NO: 37617 - DNA, 30 bp, Artificial Sequence; identical to SEQ ID NO: 2251
  Probe

SEQ ID NO: 37618 - DNA, 39 bp, Artificial Sequence; identical to SEQ ID NO: 15014
  Probe

SEQ ID NO: 37619 - DNA, 30 bp, Artificial Sequence; identical to SEQ ID NO: 26502
  Probe

SEQ ID NO: 37620 - DNA, 32 bp, Artificial Sequence; identical to SEQ ID NO: 2257
  Probe

SEQ ID NO: 37621 - DNA, 33 bp, Artificial Sequence; identical to SEQ ID NO: 2258
  Probe

SEQ ID NO: 37622 - DNA, 34 bp, Artificial Sequence; identical to SEQ ID NO: 2259
  Probe

SEQ ID NO: 37623 - DNA, 35 bp, Artificial Sequence; identical to SEQ ID NO: 15025
  Probe

SEQ ID NO: 37624 - DNA, 36 bp, Artificial Sequence; identical to SEQ ID NO: 2260
  Probe

SEQ ID NO: 37625 - DNA, 31 bp, Artificial Sequence
  Probe
aagattctaggttcgactcctggctggctcg

SEQ ID NO: 37626 - DNA, 28 bp, Artificial Sequence
  Probe
aagattgagggttcgagtcccttcgtgg

SEQ ID NO: 37627 - DNA, 30 bp, Artificial Sequence
  Probe
aagattgagggttcgagtcccttcgtggtc

SEQ ID NO: 37628 - DNA, 37 bp, Artificial Sequence
  Probe
aagattgagggttcgagtcccttcgtggtcgtcgttt

SEQ ID NO: 37629 - DNA, 34 bp, Artificial Sequence; identical to SEQ ID NO: 2266
  Probe

SEQ ID NO: 37630 - DNA, 50 bp, Artificial Sequence
  Probe
aagattgagggttcgagtcccttcgtggtcgttgccatgttaacgttttc

SEQ ID NO: 37631 - DNA, 35 bp, Artificial Sequence; identical to SEQ ID NO: 77
  Probe

SEQ ID NO: 37632 - DNA, 50 bp, Artificial Sequence; identical to SEQ ID NO: 2271
  Probe

SEQ ID NO: 37633 - DNA, 30 bp, Artificial Sequence; identical to SEQ ID NO: 2277
  Probe

SEQ ID NO: 37634 - DNA, 50 bp, Artificial Sequence; identical to SEQ ID NO: 2283
  Probe

SEQ ID NO: 37635 - DNA, 50 bp, Artificial Sequence
  Probe
aagcaggcttataggtggccccatggtgtaatggttagcactctggactt

SEQ ID NO: 37636 - DNA, 34 bp, Artificial Sequence
  Probe
aagcagttgacccgggttcgattcccggccaacg

SEQ ID NO: 37637 - DNA, 35 bp, Artificial Sequence
  Probe
aagcagttgacccgggttcgattcccggccaacgc

SEQ ID NO: 37638 - DNA, 32 bp, Artificial Sequence
  Probe
aagcatagctgccttccaagcagttgacccgg

SEQ ID NO: 37639 - DNA, 50 bp, Artificial Sequence; identical to SEQ ID NO: 2291
  Probe

SEQ ID NO: 37640 - DNA, 50 bp, Artificial Sequence
  Probe
aagccagggattgtgggttcgagtcccatctggggtggcctgtgactttt

SEQ ID NO: 37641 - DNA, 30 bp, Artificial Sequence; identical to SEQ ID NO: 15091
  Probe

SEQ ID NO: 37642 - DNA, 28 bp, Artificial Sequence
  Probe
aagctatcgggcccataccccgaaaatg

SEQ ID NO: 37643 - DNA, 29 bp, Artificial Sequence
  Probe
aagctatcgggcccataccccgaaaatgt

SEQ ID NO: 37644 - DNA, 30 bp, Artificial Sequence; identical to SEQ ID NO: 2306
  Probe

SEQ ID NO: 37645 - DNA, 31 bp, Artificial Sequence; identical to SEQ ID NO: 2307
  Probe

SEQ ID NO: 37646 - DNA, 32 bp, Artificial Sequence; identical to SEQ ID NO: 2308
  Probe

SEQ ID NO: 37647 - DNA, 34 bp, Artificial Sequence; identical to SEQ ID NO: 2310
  Probe

SEQ ID NO: 37648 - DNA, 35 bp, Artificial Sequence; identical to SEQ ID NO: 2311
  Probe

SEQ ID NO: 37649 - DNA, 50 bp, Artificial Sequence; identical to SEQ ID NO: 80
  Probe

SEQ ID NO: 37650 - DNA, 26 bp, Artificial Sequence
  Probe
aagctcacaagaactgctaactcatg

SEQ ID NO: 37651 - DNA, 50 bp, Artificial Sequence
  Probe
aaggaggccggttagctcagttggttagagcgtggtgctaataacgccaa

SEQ ID NO: 37652 - DNA, 29 bp, Artificial Sequence
  Probe
aagggcttagcttaattaaagtggctgat

SEQ ID NO: 37653 - DNA, 50 bp, Artificial Sequence
  Probe
aagggcttagcttaattaaagtggctgatttgcgttcagttgatgcagag

SEQ ID NO: 37654 - DNA, 32 bp, Artificial Sequence; identical to SEQ ID NO: 2344
  Probe

SEQ ID NO: 37655 - DNA, 50 bp, Artificial Sequence; identical to SEQ ID NO: 2358
  Probe

SEQ ID NO: 37656 - DNA, 28 bp, Artificial Sequence
  Probe
aaggtccccggttcgaaaccgggcggaa

SEQ ID NO: 37657 - DNA, 38 bp, Artificial Sequence
  Probe
aaggtccccggttcgaaactgggcggaaacagaggttt

SEQ ID NO: 37658 - DNA, 21 bp, Artificial Sequence
  Probe
aaggtccctggttcaatcccg

SEQ ID NO: 37659 - DNA, 29 bp, Artificial Sequence
  Probe
aaggtccctggttcaatcccgggtttcgg

SEQ ID NO: 37660 - DNA, 21 bp, Artificial Sequence
  Probe
aaggtccctggttcgatcccg

SEQ ID NO: 37661 - DNA, 28 bp, Artificial Sequence
  Probe
aaggtccctggttcgatcccgggtttcg

SEQ ID NO: 37662 - DNA, 30 bp, Artificial Sequence
  Probe
aaggtccctggttcgatcccgggtttcggc

SEQ ID NO: 37663 - DNA, 34 bp, Artificial Sequence
  Probe
aaggtccctggttcgatcccgggtttcggcactt

SEQ ID NO: 37664 - DNA, 34 bp, Artificial Sequence
  Probe
aaggtccctggttcgatcccgggtttcggcagct

SEQ ID NO: 37665 - DNA, 34 bp, Artificial Sequence
  Probe
aaggtccctggttcgatcccgggtttcggcaggg

SEQ ID NO: 37666 - DNA, 34 bp, Artificial Sequence
  Probe
aaggtcctgagttcgaacctcagagggggcagct

SEQ ID NO: 37667 - DNA, 41 bp, Artificial Sequence; identical to SEQ ID NO: 15147
  Probe

SEQ ID NO: 37668 - DNA, 21 bp, Artificial Sequence
  Probe
aaggtcctgggttcgagcccc

SEQ ID NO: 37669 - DNA, 28 bp, Artificial Sequence
  Probe
aaggtcctgggttcgagccccagtggaa

SEQ ID NO: 37670 - DNA, 31 bp, Artificial Sequence; identical to SEQ ID NO: 15149
  Probe

SEQ ID NO: 37671 - DNA, 34 bp, Artificial Sequence; identical to SEQ ID NO: 2360
  Probe

SEQ ID NO: 37672 - DNA, 42 bp, Artificial Sequence
  Probe
aaggtcgtgagttcgagcctcacacggggcagtctaacgttt

SEQ ID NO: 37673 - DNA, 34 bp, Artificial Sequence; identical to SEQ ID NO: 15156
  Probe

SEQ ID NO: 37674 - DNA, 31 bp, Artificial Sequence
  Probe
aaggttccgggttcgagtcccggcggagtcg

SEQ ID NO: 37675 - DNA, 30 bp, Artificial Sequence
  Probe
aaggttgcgtgttcaagtcacgtcggggtc

SEQ ID NO: 37676 - DNA, 31 bp, Artificial Sequence
  Probe
aaggttgtgggttcgagtcccaccagagtcg

SEQ ID NO: 37677 - DNA, 35 bp, Artificial Sequence
  Probe
aaggttgtgggttcgagtcccaccagagtcgcttt

SEQ ID NO: 37678 - DNA, 36 bp, Artificial Sequence; identical to SEQ ID NO: 26646
  Probe

SEQ ID NO: 37679 - DNA, 24 bp, Artificial Sequence
  Probe
aagtgtactggaaagtgcacttgg

SEQ ID NO: 37680 - DNA, 25 bp, Artificial Sequence
  Probe
aagtgtactggaaagtgcacttgga

SEQ ID NO: 37681 - DNA, 26 bp, Artificial Sequence
  Probe
aagtgtactggaaagtgcacttggac

SEQ ID NO: 37682 - DNA, 27 bp, Artificial Sequence
  Probe
aagtgtactggaaagtgcacttggacg

SEQ ID NO: 37683 - DNA, 28 bp, Artificial Sequence
  Probe
aagtgtactggaaagtgcacttggacga

SEQ ID NO: 37684 - DNA, 29 bp, Artificial Sequence
  Probe
aagtgtactggaaagtgcacttggacgaa

SEQ ID NO: 37685 - DNA, 30 bp, Artificial Sequence; identical to SEQ ID NO: 2379
  Probe

SEQ ID NO: 37686 - DNA, 31 bp, Artificial Sequence; identical to SEQ ID NO: 2380
  Probe

SEQ ID NO: 37687 - DNA, 32 bp, Artificial Sequence; identical to SEQ ID NO: 2381
  Probe

SEQ ID NO: 37688 - DNA, 33 bp, Artificial Sequence; identical to SEQ ID NO: 2382
  Probe

SEQ ID NO: 37689 - DNA, 34 bp, Artificial Sequence; identical to SEQ ID NO: 2383
  Probe

SEQ ID NO: 37690 - DNA, 35 bp, Artificial Sequence; identical to SEQ ID NO: 2384
  Probe

SEQ ID NO: 37691 - DNA, 36 bp, Artificial Sequence; identical to SEQ ID NO: 2385
  Probe

SEQ ID NO: 37692 - DNA, 37 bp, Artificial Sequence; identical to SEQ ID NO: 2386
  Probe

SEQ ID NO: 37693 - DNA, 30 bp, Artificial Sequence; identical to SEQ ID NO: 2390
  Probe

SEQ ID NO: 37694 - DNA, 31 bp, Artificial Sequence; identical to SEQ ID NO: 86
  Probe

SEQ ID NO: 37695 - DNA, 32 bp, Artificial Sequence; identical to SEQ ID NO: 2391
  Probe

SEQ ID NO: 37696 - DNA, 33 bp, Artificial Sequence; identical to SEQ ID NO: 15194
  Probe

SEQ ID NO: 37697 - DNA, 35 bp, Artificial Sequence
  Probe
aagttccctggtggtctagtggttaggattcggcg

SEQ ID NO: 37698 - DNA, 45 bp, Artificial Sequence
  Probe
aagttggtggttcgagcccacccaggaacgcttgttcgagctttt

SEQ ID NO: 37699 - DNA, 50 bp, Artificial Sequence; identical to SEQ ID NO: 2411
  Probe

SEQ ID NO: 37700 - DNA, 50 bp, Artificial Sequence; identical to SEQ ID NO: 2414
  Probe

SEQ ID NO: 37701 - DNA, 49 bp, Artificial Sequence; identical to SEQ ID NO: 2416
  Probe

SEQ ID NO: 37702 - DNA, 50 bp, Artificial Sequence; identical to SEQ ID NO: 2417
  Probe

SEQ ID NO: 37703 - DNA, 19 bp, Artificial Sequence
  Probe
aatagctcagttgggagag

SEQ ID NO: 37704 - DNA, 30 bp, Artificial Sequence; identical to SEQ ID NO: 2424
  Probe

SEQ ID NO: 37705 - DNA, 50 bp, Artificial Sequence; identical to SEQ ID NO: 2425
  Probe

SEQ ID NO: 37706 - DNA, 30 bp, Artificial Sequence; identical to SEQ ID NO: 15218
  Probe

SEQ ID NO: 37707 - DNA, 35 bp, Artificial Sequence
  Probe
aatccagcaatccgagttcgaatctcggtgggacc

SEQ ID NO: 37708 - DNA, 36 bp, Artificial Sequence; identical to SEQ ID NO: 93
  Probe

SEQ ID NO: 37709 - DNA, 38 bp, Artificial Sequence; identical to SEQ ID NO: 2435
  Probe

SEQ ID NO: 37710 - DNA, 38 bp, Artificial Sequence; identical to SEQ ID NO: 2437
  Probe

SEQ ID NO: 37711 - DNA, 35 bp, Artificial Sequence; identical to SEQ ID NO: 94
  Probe

SEQ ID NO: 37712 - DNA, 36 bp, Artificial Sequence; identical to SEQ ID NO: 95
  Probe

SEQ ID NO: 37713 - DNA, 33 bp, Artificial Sequence
  Probe
aatccagcgatccgagttcaagtctcggtggaa

SEQ ID NO: 37714 - DNA, 34 bp, Artificial Sequence
  Probe
aatccagcgatccgagttcaagtctcggtggaac

SEQ ID NO: 37715 - DNA, 36 bp, Artificial Sequence; identical to SEQ ID NO: 15234
  Probe

SEQ ID NO: 37716 - DNA, 39 bp, Artificial Sequence; identical to SEQ ID NO: 15236
  Probe

SEQ ID NO: 37717 - DNA, 31 bp, Artificial Sequence
  Probe
aatcccacttctgacagagctcaattacttt

SEQ ID NO: 37718 - DNA, 34 bp, Artificial Sequence
  Probe
aatcccatcctcgtcggctgcatagcaagccttt

SEQ ID NO: 37719 - DNA, 19 bp, Artificial Sequence
  Probe
aatcctatatatcttaatg

SEQ ID NO: 37720 - DNA, 50 bp, Artificial Sequence; identical to SEQ ID NO: 101
  Probe

SEQ ID NO: 37721 - DNA, 33 bp, Artificial Sequence; identical to SEQ ID NO: 102
  Probe

SEQ ID NO: 37722 - DNA, 34 bp, Artificial Sequence; identical to SEQ ID NO: 103
  Probe

SEQ ID NO: 37723 - DNA, 36 bp, Artificial Sequence; identical to SEQ ID NO: 2466
  Probe

SEQ ID NO: 37724 - DNA, 37 bp, Artificial Sequence; identical to SEQ ID NO: 2467
  Probe

SEQ ID NO: 37725 - DNA, 38 bp, Artificial Sequence; identical to SEQ ID NO: 2468
  Probe

SEQ ID NO: 37726 - DNA, 34 bp, Artificial Sequence
  Probe
aatctcggtggtaccttggtgtctgctggccttt

SEQ ID NO: 37727 - DNA, 18 bp, Artificial Sequence
  Probe
aatctgaaggtcctgagt

SEQ ID NO: 37728 - DNA, 46 bp, Artificial Sequence; identical to SEQ ID NO: 2473
  Probe

SEQ ID NO: 37729 - DNA, 37 bp, Artificial Sequence; identical to SEQ ID NO: 2478
  Probe

SEQ ID NO: 37730 - DNA, 50 bp, Artificial Sequence; identical to SEQ ID NO: 2483
  Probe

SEQ ID NO: 37731 - DNA, 20 bp, Artificial Sequence
  Probe
aatgccccaactaaatacta

SEQ ID NO: 37732 - DNA, 22 bp, Artificial Sequence
  Probe
aatgccccaactaaatactacc

SEQ ID NO: 37733 - DNA, 23 bp, Artificial Sequence
  Probe
aatgccccaactaaatactaccg

SEQ ID NO: 37734 - DNA, 24 bp, Artificial Sequence
  Probe
aatgccccaactaaatactaccgt

SEQ ID NO: 37735 - DNA, 25 bp, Artificial Sequence
  Probe
aatgccccaactaaatactaccgta

SEQ ID NO: 37736 - DNA, 26 bp, Artificial Sequence
  Probe
aatgccccaactaaatactaccgtat

SEQ ID NO: 37737 - DNA, 27 bp, Artificial Sequence
  Probe
aatgccccaactaaatactaccgtatg

SEQ ID NO: 37738 - DNA, 28 bp, Artificial Sequence
  Probe
aatgccccaactaaatactaccgtatgg

SEQ ID NO: 37739 - DNA, 29 bp, Artificial Sequence
  Probe
aatgccccaactaaatactaccgtatggc

SEQ ID NO: 37740 - DNA, 31 bp, Artificial Sequence
  Probe
aatggaggcgtgggttcgaatcccacttctg

SEQ ID NO: 37741 - DNA, 21 bp, Artificial Sequence
  Probe
aatggataacgcgtctgacta

SEQ ID NO: 37742 - DNA, 26 bp, Artificial Sequence
  Probe
aatggataacgcgtctgactacggat

SEQ ID NO: 37743 - DNA, 18 bp, Artificial Sequence
  Probe
aatggataaggcatcagc

SEQ ID NO: 37744 - DNA, 17 bp, Artificial Sequence
  Probe
aatggataaggcattgg

SEQ ID NO: 37745 - DNA, 39 bp, Artificial Sequence
  Probe
aatggataaggcattggcctcctaagccagggattgtgg

SEQ ID NO: 37746 - DNA, 17 bp, Artificial Sequence
  Probe
aatggataaggcgtctg

SEQ ID NO: 37747 - DNA, 29 bp, Artificial Sequence
  Probe
aatggcttggtttttccttccccttgtta

SEQ ID NO: 37748 - DNA, 31 bp, Artificial Sequence
  Probe
aatgtcgttagtctaggctgtcagctcttcc

SEQ ID NO: 37749 - DNA, 22 bp, Artificial Sequence
  Probe
aatgttggttatacccttcccg

SEQ ID NO: 37750 - DNA, 38 bp, Artificial Sequence; identical to SEQ ID NO: 2503
  Probe

SEQ ID NO: 37751 - DNA, 38 bp, Artificial Sequence; identical to SEQ ID NO: 15309
  Probe

SEQ ID NO: 37752 - DNA, 38 bp, Artificial Sequence; identical to SEQ ID NO: 2508
  Probe

SEQ ID NO: 37753 - DNA, 31 bp, Artificial Sequence; identical to SEQ ID NO: 15317
  Probe

SEQ ID NO: 37754 - DNA, 50 bp, Artificial Sequence
  Probe
aattctcgcctgccacgcgggaggcccgggttcgattcccggcccatgca

SEQ ID NO: 37755 - DNA, 45 bp, Artificial Sequence; identical to SEQ ID NO: 2521
  Probe

SEQ ID NO: 37756 - DNA, 50 bp, Artificial Sequence; identical to SEQ ID NO: 2525
  Probe

SEQ ID NO: 37757 - DNA, 19 bp, Artificial Sequence
  Probe
acaacagaggcttacgacc

SEQ ID NO: 37758 - DNA, 20 bp, Artificial Sequence
  Probe
acaacagaggcttacgaccc

SEQ ID NO: 37759 - DNA, 22 bp, Artificial Sequence
  Probe
acaacagaggcttacgacccct

SEQ ID NO: 37760 - DNA, 24 bp, Artificial Sequence
  Probe
acaacagaggcttacgacccctta

SEQ ID NO: 37761 - DNA, 25 bp, Artificial Sequence
  Probe
acaacagaggcttacgaccccttat

SEQ ID NO: 37762 - DNA, 26 bp, Artificial Sequence
  Probe
acaacagaggcttacgaccccttatt

SEQ ID NO: 37763 - DNA, 27 bp, Artificial Sequence
  Probe
acaacagaggcttacgaccccttattt

SEQ ID NO: 37764 - DNA, 29 bp, Artificial Sequence
  Probe
acaacagaggcttacgaccccttatttac

SEQ ID NO: 37765 - DNA, 31 bp, Artificial Sequence; identical to SEQ ID NO: 2563
  Probe

SEQ ID NO: 37766 - DNA, 32 bp, Artificial Sequence; identical to SEQ ID NO: 2564
  Probe

SEQ ID NO: 37767 - DNA, 33 bp, Artificial Sequence; identical to SEQ ID NO: 2565
  Probe

SEQ ID NO: 37768 - DNA, 34 bp, Artificial Sequence; identical to SEQ ID NO: 2566
  Probe

SEQ ID NO: 37769 - DNA, 35 bp, Artificial Sequence; identical to SEQ ID NO: 2567
  Probe

SEQ ID NO: 37770 - DNA, 36 bp, Artificial Sequence; identical to SEQ ID NO: 2568
  Probe

SEQ ID NO: 37771 - DNA, 38 bp, Artificial Sequence; identical to SEQ ID NO: 2570
  Probe

SEQ ID NO: 37772 - DNA, 20 bp, Artificial Sequence
  Probe
acaagaactgctaactcatg

SEQ ID NO: 37773 - DNA, 50 bp, Artificial Sequence; identical to SEQ ID NO: 2588
  Probe

SEQ ID NO: 37774 - DNA, 20 bp, Artificial Sequence
  Probe
acaagtggttacccttctta

SEQ ID NO: 37775 - DNA, 26 bp, Artificial Sequence
  Probe
acaagtggttacccttcttacgtctt

SEQ ID NO: 37776 - DNA, 22 bp, Artificial Sequence
  Probe
acaatggcacggcaaggggagt

SEQ ID NO: 37777 - DNA, 22 bp, Artificial Sequence
  Probe
acaatggcacggcaaggggctc

SEQ ID NO: 37778 - DNA, 20 bp, Artificial Sequence
  Probe
acacactaaaaaatcccttt

SEQ ID NO: 37779 - DNA, 23 bp, Artificial Sequence
  Probe
acacctcagaaggtctcactttt

SEQ ID NO: 37780 - DNA, 20 bp, Artificial Sequence
  Probe
acacctctttacagtgaaat

SEQ ID NO: 37781 - DNA, 21 bp, Artificial Sequence
  Probe
acacgcagaaggtcctgggtt

SEQ ID NO: 37782 - DNA, 42 bp, Artificial Sequence; identical to SEQ ID NO: 15405
  Probe

SEQ ID NO: 37783 - DNA, 30 bp, Artificial Sequence
  Probe
acacgcagaaggtcctgggttcgagcccca

SEQ ID NO: 37784 - DNA, 31 bp, Artificial Sequence; identical to SEQ ID NO: 27006
  Probe

SEQ ID NO: 37785 - DNA, 42 bp, Artificial Sequence; identical to SEQ ID NO: 2613
  Probe

SEQ ID NO: 37786 - DNA, 42 bp, Artificial Sequence; identical to SEQ ID NO: 15410
  Probe

SEQ ID NO: 37787 - DNA, 20 bp, Artificial Sequence
  Probe
acacgcgaaaagtccccggt

SEQ ID NO: 37788 - DNA, 21 bp, Artificial Sequence
  Probe
acacgcgaaaggtccccggtt

SEQ ID NO: 37789 - DNA, 22 bp, Artificial Sequence
  Probe
acacgcgaaaggtccccggttc

SEQ ID NO: 37790 - DNA, 23 bp, Artificial Sequence
  Probe
acacgcgaaaggtccccggttcg

SEQ ID NO: 37791 - DNA, 36 bp, Artificial Sequence; identical to SEQ ID NO: 12531
  Probe

SEQ ID NO: 37792 - DNA, 37 bp, Artificial Sequence
  Probe
acacgcgaaaggtccccggttcgaaaccgggcggaaa

SEQ ID NO: 37793 - DNA, 36 bp, Artificial Sequence
  Probe
acacgcgaaaggtccccggttcgatcccgggcggaa

SEQ ID NO: 37794 - DNA, 42 bp, Artificial Sequence
  Probe
acacgcgaaaggtccccggttcgatcccgggcggaaacaggt

SEQ ID NO: 37795 - DNA, 20 bp, Artificial Sequence
  Probe
acacgcgaaaggtccctgga

SEQ ID NO: 37796 - DNA, 20 bp, Artificial Sequence
  Probe
acacgcgaaaggtcctcggg

SEQ ID NO: 37797 - DNA, 49 bp, Artificial Sequence
  Probe
acacgcgggacacccgggttcaattcccggtcaaggcaagaggttcttt

SEQ ID NO: 37798 - DNA, 50 bp, Artificial Sequence
  Probe
acacgcgggacacccgggttcaattcccggtcaaggcaagaggttctttt

SEQ ID NO: 37799 - DNA, 19 bp, Artificial Sequence
  Probe
acacggggcacaataattt

SEQ ID NO: 37800 - DNA, 44 bp, Artificial Sequence; identical to SEQ ID NO: 2618
  Probe

SEQ ID NO: 37801 - DNA, 45 bp, Artificial Sequence; identical to SEQ ID NO: 2619
  Probe

SEQ ID NO: 37802 - DNA, 46 bp, Artificial Sequence; identical to SEQ ID NO: 2620
  Probe

SEQ ID NO: 37803 - DNA, 50 bp, Artificial Sequence; identical to SEQ ID NO: 2621
  Probe

SEQ ID NO: 37804 - DNA, 31 bp, Artificial Sequence; identical to SEQ ID NO: 2625
  Probe

SEQ ID NO: 37805 - DNA, 41 bp, Artificial Sequence; identical to SEQ ID NO: 2633
  Probe

SEQ ID NO: 37806 - DNA, 20 bp, Artificial Sequence
  Probe
acagagcgtagtttcgtttt

SEQ ID NO: 37807 - DNA, 18 bp, Artificial Sequence
  Probe
acagagctcaattacttt

SEQ ID NO: 37808 - DNA, 30 bp, Artificial Sequence; identical to SEQ ID NO: 2640
  Probe

SEQ ID NO: 37809 - DNA, 28 bp, Artificial Sequence
  Probe
acagctatccattggtcttaggccccaa

SEQ ID NO: 37810 - DNA, 49 bp, Artificial Sequence; identical to SEQ ID NO: 2643
  Probe

SEQ ID NO: 37811 - DNA, 50 bp, Artificial Sequence; identical to SEQ ID NO: 2644
  Probe

SEQ ID NO: 37812 - DNA, 32 bp, Artificial Sequence; identical to SEQ ID NO: 15463
  Probe

SEQ ID NO: 37813 - DNA, 28 bp, Artificial Sequence
  Probe
acagtcagaggttcaattcctcttctta

SEQ ID NO: 37814 - DNA, 31 bp, Artificial Sequence; identical to SEQ ID NO: 2654
  Probe

SEQ ID NO: 37815 - DNA, 34 bp, Artificial Sequence; identical to SEQ ID NO: 2656
  Probe

SEQ ID NO: 37816 - DNA, 34 bp, Artificial Sequence
  Probe
acagtggctcgttggtctaggggtatgattctcg

SEQ ID NO: 37817 - DNA, 28 bp, Artificial Sequence
  Probe
acatacccatggccaacctcctactcct

SEQ ID NO: 37818 - DNA, 29 bp, Artificial Sequence
  Probe
acatacccatggccaacctcctactcctc

SEQ ID NO: 37819 - DNA, 30 bp, Artificial Sequence; identical to SEQ ID NO: 2668
  Probe

SEQ ID NO: 37820 - DNA, 18 bp, Artificial Sequence
  Probe
acatatgtccgcgtgggt

SEQ ID NO: 37821 - DNA, 50 bp, Artificial Sequence; identical to SEQ ID NO: 2685
  Probe

SEQ ID NO: 37822 - DNA, 24 bp, Artificial Sequence
  Probe
acatggtctagcggttaggattcc

SEQ ID NO: 37823 - DNA, 25 bp, Artificial Sequence
  Probe
acatggtctagcggttaggattcct

SEQ ID NO: 37824 - DNA, 28 bp, Artificial Sequence
  Probe
accaaaacatcagattgtgaatctgaca

SEQ ID NO: 37825 - DNA, 31 bp, Artificial Sequence; identical to SEQ ID NO: 2695
  Probe

SEQ ID NO: 37826 - DNA, 20 bp, Artificial Sequence
  Probe
accaacacctctttacagtg

SEQ ID NO: 37827 - DNA, 24 bp, Artificial Sequence
  Probe
accaacacctctttacagtgaaat

SEQ ID NO: 37828 - DNA, 36 bp, Artificial Sequence; identical to SEQ ID NO: 2718
  Probe

SEQ ID NO: 37829 - DNA, 37 bp, Artificial Sequence; identical to SEQ ID NO: 2719
  Probe

SEQ ID NO: 37830 - DNA, 38 bp, Artificial Sequence; identical to SEQ ID NO: 2720
  Probe

SEQ ID NO: 37831 - DNA, 38 bp, Artificial Sequence; identical to SEQ ID NO: 2727
  Probe

SEQ ID NO: 37832 - DNA, 50 bp, Artificial Sequence; identical to SEQ ID NO: 2749
  Probe

SEQ ID NO: 37833 - DNA, 31 bp, Artificial Sequence
  Probe
acccagatagctcagtcagtagagcatcaga

SEQ ID NO: 37834 - DNA, 37 bp, Artificial Sequence; identical to SEQ ID NO: 151
  Probe

SEQ ID NO: 37835 - DNA, 39 bp, Artificial Sequence; identical to SEQ ID NO: 2764
  Probe

SEQ ID NO: 37836 - DNA, 25 bp, Artificial Sequence
  Probe
acccagggacggtcagtgcttcttt

SEQ ID NO: 37837 - DNA, 39 bp, Artificial Sequence; identical to SEQ ID NO: 2766
  Probe

SEQ ID NO: 37838 - DNA, 38 bp, Artificial Sequence; identical to SEQ ID NO: 2773
  Probe

SEQ ID NO: 37839 - DNA, 25 bp, Artificial Sequence
  Probe
acccgggttcgattcccggccaacg

SEQ ID NO: 37840 - DNA, 26 bp, Artificial Sequence
  Probe
acccgggttcgattcccggccaacgc

SEQ ID NO: 37841 - DNA, 22 bp, Artificial Sequence
  Probe
accctgtggtctagtggttagg

SEQ ID NO: 37842 - DNA, 26 bp, Artificial Sequence
  Probe
accgagcgtccaagctctttccattt

SEQ ID NO: 37843 - DNA, 27 bp, Artificial Sequence
  Probe
accgagcgtccaagctctttccatttt

SEQ ID NO: 37844 - DNA, 35 bp, Artificial Sequence
  Probe
accgccgcggcccgggttcgattcccggccaggga

SEQ ID NO: 37845 - DNA, 36 bp, Artificial Sequence; identical to SEQ ID NO: 12559
  Probe

SEQ ID NO: 37846 - DNA, 37 bp, Artificial Sequence; identical to SEQ ID NO: 2792
  Probe

SEQ ID NO: 37847 - DNA, 37 bp, Artificial Sequence; identical to SEQ ID NO: 2793
  Probe

SEQ ID NO: 37848 - DNA, 38 bp, Artificial Sequence; identical to SEQ ID NO: 15664
  Probe

SEQ ID NO: 37849 - DNA, 39 bp, Artificial Sequence; identical to SEQ ID NO: 2794
  Probe

SEQ ID NO: 37850 - DNA, 37 bp, Artificial Sequence; identical to SEQ ID NO: 2796
  Probe

SEQ ID NO: 37851 - DNA, 31 bp, Artificial Sequence
  Probe
accgctgccacacctcagaaggtctcacttt

SEQ ID NO: 37852 - DNA, 32 bp, Artificial Sequence; identical to SEQ ID NO: 15681
  Probe

SEQ ID NO: 37853 - DNA, 25 bp, Artificial Sequence
  Probe
accgctgccagggttgctgtctttt

SEQ ID NO: 37854 - DNA, 32 bp, Artificial Sequence; identical to SEQ ID NO: 2803
  Probe

SEQ ID NO: 37855 - DNA, 33 bp, Artificial Sequence; identical to SEQ ID NO: 2804
  Probe

SEQ ID NO: 37856 - DNA, 34 bp, Artificial Sequence; identical to SEQ ID NO: 2805
  Probe

SEQ ID NO: 37857 - DNA, 50 bp, Artificial Sequence
  Probe
accggagcgttggtggtatagtggtaagcatagctgccttccaagcagtt

SEQ ID NO: 37858 - DNA, 18 bp, Artificial Sequence
  Probe
accggggttcgattcccc

SEQ ID NO: 37859 - DNA, 21 bp, Artificial Sequence
  Probe
accggggttcgattccccgac

SEQ ID NO: 37860 - DNA, 22 bp, Artificial Sequence
  Probe
accggggttcgattccccgacg

SEQ ID NO: 37861 - DNA, 23 bp, Artificial Sequence
  Probe
accggggttcgattccccgacgg

SEQ ID NO: 37862 - DNA, 26 bp, Artificial Sequence
  Probe
accggggttcgattccccgacgggga

SEQ ID NO: 37863 - DNA, 28 bp, Artificial Sequence
  Probe
accggggttcgattccccgacggggaga

SEQ ID NO: 37864 - DNA, 28 bp, Artificial Sequence
  Probe
accggggttcgattccccgacggggagg

SEQ ID NO: 37865 - DNA, 30 bp, Artificial Sequence; identical to SEQ ID NO: 2811
  Probe

SEQ ID NO: 37866 - DNA, 42 bp, Artificial Sequence
  Probe
accggggttcgattccccgacggggaggcacagtaattgttt

SEQ ID NO: 37867 - DNA, 50 bp, Artificial Sequence; identical to SEQ ID NO: 2815
  Probe

SEQ ID NO: 37868 - DNA, 18 bp, Artificial Sequence
  Probe
acctattctcaaacttta

SEQ ID NO: 37869 - DNA, 19 bp, Artificial Sequence
  Probe
acctattctcaaactttaa

SEQ ID NO: 37870 - DNA, 20 bp, Artificial Sequence
  Probe
acctattctcaaactttaaa

SEQ ID NO: 37871 - DNA, 21 bp, Artificial Sequence
  Probe
acctattctcaaactttaaat

SEQ ID NO: 37872 - DNA, 22 bp, Artificial Sequence
  Probe
acctattctcaaactttaaatg

SEQ ID NO: 37873 - DNA, 23 bp, Artificial Sequence
  Probe
acctattctcaaactttaaatgg

SEQ ID NO: 37874 - DNA, 24 bp, Artificial Sequence
  Probe
acctattctcaaactttaaatggg

SEQ ID NO: 37875 - DNA, 25 bp, Artificial Sequence
  Probe
acctattctcaaactttaaatgggc

SEQ ID NO: 37876 - DNA, 26 bp, Artificial Sequence
  Probe
acctattctcaaactttaaatgggca

SEQ ID NO: 37877 - DNA, 27 bp, Artificial Sequence
  Probe
acctattctcaaactttaaatgggcaa

SEQ ID NO: 37878 - DNA, 28 bp, Artificial Sequence
  Probe
acctattctcaaactttaaatgggcaag

SEQ ID NO: 37879 - DNA, 29 bp, Artificial Sequence
  Probe
acctattctcaaactttaaatgggcaaga

SEQ ID NO: 37880 - DNA, 30 bp, Artificial Sequence; identical to SEQ ID NO: 27232
  Probe

SEQ ID NO: 37881 - DNA, 31 bp, Artificial Sequence; identical to SEQ ID NO: 15733
  Probe

SEQ ID NO: 37882 - DNA, 32 bp, Artificial Sequence; identical to SEQ ID NO: 2827
  Probe

SEQ ID NO: 37883 - DNA, 33 bp, Artificial Sequence; identical to SEQ ID NO: 2828
  Probe

SEQ ID NO: 37884 - DNA, 34 bp, Artificial Sequence; identical to SEQ ID NO: 15736
  Probe

SEQ ID NO: 37885 - DNA, 35 bp, Artificial Sequence; identical to SEQ ID NO: 15737
  Probe

SEQ ID NO: 37886 - DNA, 36 bp, Artificial Sequence; identical to SEQ ID NO: 2829
  Probe

SEQ ID NO: 37887 - DNA, 37 bp, Artificial Sequence; identical to SEQ ID NO: 2830
  Probe

SEQ ID NO: 37888 - DNA, 38 bp, Artificial Sequence; identical to SEQ ID NO: 15740
  Probe

SEQ ID NO: 37889 - DNA, 41 bp, Artificial Sequence
  Probe
acctattctcaaactttaaatgggcaagaagcccagctagc

SEQ ID NO: 37890 - DNA, 42 bp, Artificial Sequence
  Probe
acctattctcaaactttaaatgggcaagaagcccagctagct

SEQ ID NO: 37891 - DNA, 20 bp, Artificial Sequence
  Probe
acctcagaaggtctcacttt

SEQ ID NO: 37892 - DNA, 21 bp, Artificial Sequence
  Probe
acctcagaaggtctcactttt

SEQ ID NO: 37893 - DNA, 22 bp, Artificial Sequence
  Probe
acctcagaaggtctcacttttc

SEQ ID NO: 37894 - DNA, 29 bp, Artificial Sequence
  Probe
acctcagaaggtctcacttttctatccat

SEQ ID NO: 37895 - DNA, 25 bp, Artificial Sequence
  Probe
acctcagagggggcagctgccattt

SEQ ID NO: 37896 - DNA, 50 bp, Artificial Sequence; identical to SEQ ID NO: 2840
  Probe

SEQ ID NO: 37897 - DNA, 50 bp, Artificial Sequence; identical to SEQ ID NO: 2841
  Probe

SEQ ID NO: 37898 - DNA, 36 bp, Artificial Sequence; identical to SEQ ID NO: 15773
  Probe

SEQ ID NO: 37899 - DNA, 50 bp, Artificial Sequence; identical to SEQ ID NO: 2843
  Probe

SEQ ID NO: 37900 - DNA, 18 bp, Artificial Sequence
  Probe
acgcagaaggtcctgggt

SEQ ID NO: 37901 - DNA, 38 bp, Artificial Sequence; identical to SEQ ID NO: 167
  Probe

SEQ ID NO: 37902 - DNA, 20 bp, Artificial Sequence
  Probe
acgcgaaaggtccccggttc

SEQ ID NO: 37903 - DNA, 34 bp, Artificial Sequence; identical to SEQ ID NO: 12585
  Probe

SEQ ID NO: 37904 - DNA, 34 bp, Artificial Sequence; identical to SEQ ID NO: 15796
  Probe

SEQ ID NO: 37905 - DNA, 34 bp, Artificial Sequence; identical to SEQ ID NO: 15804
  Probe

SEQ ID NO: 37906 - DNA, 35 bp, Artificial Sequence
  Probe
acgcgggagacccgggttcaattcccggccaatgc

SEQ ID NO: 37907 - DNA, 28 bp, Artificial Sequence
  Probe
acgcgggagaccggggttcaattccccg

SEQ ID NO: 37908 - DNA, 30 bp, Artificial Sequence; identical to SEQ ID NO: 12588
  Probe

SEQ ID NO: 37909 - DNA, 31 bp, Artificial Sequence; identical to SEQ ID NO: 176
  Probe

SEQ ID NO: 37910 - DNA, 37 bp, Artificial Sequence; identical to SEQ ID NO: 2859
  Probe

SEQ ID NO: 37911 - DNA, 21 bp, Artificial Sequence
  Probe
acgcgggagaccggggttcga

SEQ ID NO: 37912 - DNA, 22 bp, Artificial Sequence
  Probe
acgcgggagaccggggttcgat

SEQ ID NO: 37913 - DNA, 29 bp, Artificial Sequence
  Probe
acgcgggagaccggggttcgattccccaa

SEQ ID NO: 37914 - DNA, 33 bp, Artificial Sequence; identical to SEQ ID NO: 15821
  Probe

SEQ ID NO: 37915 - DNA, 36 bp, Artificial Sequence; identical to SEQ ID NO: 15822
  Probe

SEQ ID NO: 37916 - DNA, 37 bp, Artificial Sequence; identical to SEQ ID NO: 2865
  Probe

SEQ ID NO: 37917 - DNA, 45 bp, Artificial Sequence
  Probe
acgcgggagaccggggttcgattccccgacggggagaaaagttgc

SEQ ID NO: 37918 - DNA, 46 bp, Artificial Sequence
  Probe
acgcgggagaccggggttcgattccccgacggggagaaaagttgct

SEQ ID NO: 37919 - DNA, 50 bp, Artificial Sequence; identical to SEQ ID NO: 15827
  Probe

SEQ ID NO: 37920 - DNA, 45 bp, Artificial Sequence
  Probe
acgcgggagaccggggttcgattccccgacggggagacgaagcag

SEQ ID NO: 37921 - DNA, 50 bp, Artificial Sequence
  Probe
acgcgggagaccggggttcgattccccgacggggagacgaagcagttgct

SEQ ID NO: 37922 - DNA, 45 bp, Artificial Sequence
  Probe
acgcgggagaccggggttcgattccccgacggggagagtactagc

SEQ ID NO: 37923 - DNA, 50 bp, Artificial Sequence
  Probe
acgcgggagaccggggttcgattccccgacggggagagtactagcagttt

SEQ ID NO: 37924 - DNA, 37 bp, Artificial Sequence; identical to SEQ ID NO: 2872
  Probe

SEQ ID NO: 37925 - DNA, 39 bp, Artificial Sequence; identical to SEQ ID NO: 15834
  Probe

SEQ ID NO: 37926 - DNA, 42 bp, Artificial Sequence
  Probe
acgcgggagaccggggttcgattccccgacggggaggaggct

SEQ ID NO: 37927 - DNA, 45 bp, Artificial Sequence
  Probe
acgcgggagaccggggttcgattccccgacggggaggaggcttaa

SEQ ID NO: 37928 - DNA, 46 bp, Artificial Sequence
  Probe
acgcgggagaccggggttcgattccccgacggggaggaggcttaaa

SEQ ID NO: 37929 - DNA, 49 bp, Artificial Sequence
  Probe
acgcgggagaccggggttcgattccccgacggggaggaggcttaaactt

SEQ ID NO: 37930 - DNA, 50 bp, Artificial Sequence
  Probe
acgcgggagaccggggttcgattccccgacggggaggaggcttaaacttt

SEQ ID NO: 37931 - DNA, 46 bp, Artificial Sequence
  Probe
acgcgggagaccggggttcgattccccgacggggaggcacagtaat

SEQ ID NO: 37932 - DNA, 50 bp, Artificial Sequence; identical to SEQ ID NO: 15840
  Probe

SEQ ID NO: 37933 - DNA, 41 bp, Artificial Sequence
  Probe
acgcgggagaccggggttcgattccccgacggggaggcagc

SEQ ID NO: 37934 - DNA, 42 bp, Artificial Sequence
  Probe
acgcgggagaccggggttcgattccccgacggggaggcagcc

SEQ ID NO: 37935 - DNA, 45 bp, Artificial Sequence
  Probe
acgcgggagaccggggttcgattccccgacggggaggcagccgtg

SEQ ID NO: 37936 - DNA, 50 bp, Artificial Sequence
  Probe
acgcgggagaccggggttcgattccccgacggggaggcagccgtgctttt

SEQ ID NO: 37937 - DNA, 50 bp, Artificial Sequence
  Probe
acgcgggagaccggggttcgattccccgacggggaggccaagtacgtttt

SEQ ID NO: 37938 - DNA, 41 bp, Artificial Sequence; identical to SEQ ID NO: 15842
  Probe

SEQ ID NO: 37939 - DNA, 42 bp, Artificial Sequence
  Probe
acgcgggagaccggggttcgattccccgacggggaggccggg

SEQ ID NO: 37940 - DNA, 44 bp, Artificial Sequence
  Probe
acgcgggagaccggggttcgattccccgacggggaggccgggta

SEQ ID NO: 37941 - DNA, 45 bp, Artificial Sequence
  Probe
acgcgggagaccggggttcgattccccgacggggaggccgggtac

SEQ ID NO: 37942 - DNA, 50 bp, Artificial Sequence; identical to SEQ ID NO: 2878
  Probe

SEQ ID NO: 37943 - DNA, 26 bp, Artificial Sequence
  Probe
acgcgggaggcccgggttcgattccc

SEQ ID NO: 37944 - DNA, 30 bp, Artificial Sequence; identical to SEQ ID NO: 15846
  Probe

SEQ ID NO: 37945 - DNA, 33 bp, Artificial Sequence; identical to SEQ ID NO: 15848
  Probe

SEQ ID NO: 37946 - DNA, 36 bp, Artificial Sequence; identical to SEQ ID NO: 2880
  Probe

SEQ ID NO: 37947 - DNA, 39 bp, Artificial Sequence; identical to SEQ ID NO: 2882
  Probe

SEQ ID NO: 37948 - DNA, 50 bp, Artificial Sequence
  Probe
acgcgggaggcccgggttcgattcccggccaatgcacgagtacagttttc

SEQ ID NO: 37949 - DNA, 39 bp, Artificial Sequence; identical to SEQ ID NO: 2883
  Probe

SEQ ID NO: 37950 - DNA, 36 bp, Artificial Sequence; identical to SEQ ID NO: 15864
  Probe

SEQ ID NO: 37951 - DNA, 39 bp, Artificial Sequence; identical to SEQ ID NO: 2886
  Probe

SEQ ID NO: 37952 - DNA, 26 bp, Artificial Sequence
  Probe
acgcgtgggttcgaatcccatcctcg

SEQ ID NO: 37953 - DNA, 27 bp, Artificial Sequence
  Probe
acgcgtgggttcgaatcccatcctcgt

SEQ ID NO: 37954 - DNA, 32 bp, Artificial Sequence
  Probe
acgcgttggtggtatagtggtgagcatagctg

SEQ ID NO: 37955 - DNA, 20 bp, Artificial Sequence
  Probe
acggcgtgattcataccttt

SEQ ID NO: 37956 - DNA, 38 bp, Artificial Sequence; identical to SEQ ID NO: 15872
  Probe

SEQ ID NO: 37957 - DNA, 39 bp, Artificial Sequence
  Probe
acggcttgtcctcgttagtatagtggtgagtatccccgc

SEQ ID NO: 37958 - DNA, 37 bp, Artificial Sequence; identical to SEQ ID NO: 15876
  Probe

SEQ ID NO: 37959 - DNA, 42 bp, Artificial Sequence; identical to SEQ ID NO: 15879
  Probe

SEQ ID NO: 37960 - DNA, 43 bp, Artificial Sequence; identical to SEQ ID NO: 15880
  Probe

SEQ ID NO: 37961 - DNA, 50 bp, Artificial Sequence; identical to SEQ ID NO: 15881
  Probe

SEQ ID NO: 37962 - DNA, 28 bp, Artificial Sequence
  Probe
acgggctcacatcaccccataaacaaat

SEQ ID NO: 37963 - DNA, 50 bp, Artificial Sequence
  Probe
acgggggtgtagctcagtggtagagcgcgtgcttagcatgcacgaggccc

SEQ ID NO: 37964 - DNA, 18 bp, Artificial Sequence
  Probe
acgggtccccggtagctc

SEQ ID NO: 37965 - DNA, 50 bp, Artificial Sequence
  Probe
acgtcccttcgatagctcagctggtagagcggaggactgtagctacttcc

SEQ ID NO: 37966 - DNA, 24 bp, Artificial Sequence
  Probe
acgtgggttcgaatcccatcctcg

SEQ ID NO: 37967 - DNA, 24 bp, Artificial Sequence
  Probe
acgttgggcgcgggttgtaacttt

SEQ ID NO: 37968 - DNA, 25 bp, Artificial Sequence
  Probe
acgttgggcgcgggttgtaactttt

SEQ ID NO: 37969 - DNA, 34 bp, Artificial Sequence; identical to SEQ ID NO: 192
  Probe

SEQ ID NO: 37970 - DNA, 36 bp, Artificial Sequence; identical to SEQ ID NO: 2894
  Probe

SEQ ID NO: 37971 - DNA, 37 bp, Artificial Sequence; identical to SEQ ID NO: 2895
  Probe

SEQ ID NO: 37972 - DNA, 38 bp, Artificial Sequence; identical to SEQ ID NO: 2896
  Probe

SEQ ID NO: 37973 - DNA, 41 bp, Artificial Sequence; identical to SEQ ID NO: 2899
  Probe

SEQ ID NO: 37974 - DNA, 21 bp, Artificial Sequence
  Probe
actacggatcagaagattcca

SEQ ID NO: 37975 - DNA, 22 bp, Artificial Sequence
  Probe
actacggatcagaagattccag

SEQ ID NO: 37976 - DNA, 24 bp, Artificial Sequence
  Probe
actacggatcagaagattccaggt

SEQ ID NO: 37977 - DNA, 41 bp, Artificial Sequence
  Probe
actacggatcagaagattccaggttcgactcctggctggct

SEQ ID NO: 37978 - DNA, 46 bp, Artificial Sequence
  Probe
actacggatcagaagattccaggttcgactcctggctggctcggtg

SEQ ID NO: 37979 - DNA, 22 bp, Artificial Sequence
  Probe
actacggatcagaagattctag

SEQ ID NO: 37980 - DNA, 23 bp, Artificial Sequence
  Probe
actacggatcagaagattctagg

SEQ ID NO: 37981 - DNA, 24 bp, Artificial Sequence
  Probe
actacggatcagaagattctaggt

SEQ ID NO: 37982 - DNA, 27 bp, Artificial Sequence
  Probe
actacggatcagaagattctaggttcg

SEQ ID NO: 37983 - DNA, 41 bp, Artificial Sequence
  Probe
actacggatcagaagattctaggttcgactcctggctggct

SEQ ID NO: 37984 - DNA, 46 bp, Artificial Sequence
  Probe
actacggatcagaagattctaggttcgactcctggctggctcgcga

SEQ ID NO: 37985 - DNA, 28 bp, Artificial Sequence
  Probe
actagaaatccattggggtctccccgcg

SEQ ID NO: 37986 - DNA, 30 bp, Artificial Sequence
  Probe
actagaaatccattggggtctccccgcgca

SEQ ID NO: 37987 - DNA, 31 bp, Artificial Sequence
  Probe
actagaaatccattggggtctccccgcgcag

SEQ ID NO: 37988 - DNA, 21 bp, Artificial Sequence
  Probe
actcaagctaagcttcctccg

SEQ ID NO: 37989 - DNA, 18 bp, Artificial Sequence
  Probe
actcaagcttggcttcct

SEQ ID NO: 37990 - DNA, 33 bp, Artificial Sequence; identical to SEQ ID NO: 2909
  Probe

SEQ ID NO: 37991 - DNA, 34 bp, Artificial Sequence; identical to SEQ ID NO: 2910
  Probe

SEQ ID NO: 37992 - DNA, 35 bp, Artificial Sequence; identical to SEQ ID NO: 2911
  Probe

SEQ ID NO: 37993 - DNA, 36 bp, Artificial Sequence; identical to SEQ ID NO: 2912
  Probe

SEQ ID NO: 37994 - DNA, 37 bp, Artificial Sequence; identical to SEQ ID NO: 2913
  Probe

SEQ ID NO: 37995 - DNA, 38 bp, Artificial Sequence; identical to SEQ ID NO: 2914
  Probe

SEQ ID NO: 37996 - DNA, 42 bp, Artificial Sequence; identical to SEQ ID NO: 15934
  Probe

SEQ ID NO: 37997 - DNA, 45 bp, Artificial Sequence
  Probe
actcatgcccccatgtctaacaacatggctttctcaacttttaaa

SEQ ID NO: 37998 - DNA, 35 bp, Artificial Sequence; identical to SEQ ID NO: 2917
  Probe

SEQ ID NO: 37999 - DNA, 18 bp, Artificial Sequence
  Probe
actccagatcagaaggct

SEQ ID NO: 38000 - DNA, 19 bp, Artificial Sequence
  Probe
actccagatcagaaggttg

SEQ ID NO: 38001 - DNA, 22 bp, Artificial Sequence
  Probe
actccagatcagaaggttgcgt

SEQ ID NO: 38002 - DNA, 24 bp, Artificial Sequence
  Probe
actccagatcagaaggttgcgtgt

SEQ ID NO: 38003 - DNA, 25 bp, Artificial Sequence
  Probe
actccagatcagaaggttgcgtgtt

SEQ ID NO: 38004 - DNA, 28 bp, Artificial Sequence
  Probe
actcctggctggctcgcgatgtctgttt

SEQ ID NO: 38005 - DNA, 29 bp, Artificial Sequence
  Probe
actcctggctggctcgcgatgtctgtttt

SEQ ID NO: 38006 - DNA, 32 bp, Artificial Sequence
  Probe
actcctggctggctcgcttgtgctctcacttt

SEQ ID NO: 38007 - DNA, 33 bp, Artificial Sequence
  Probe
actcctggctggctcgcttgtgctctcactttt

SEQ ID NO: 38008 - DNA, 33 bp, Artificial Sequence
  Probe
actcgaaatccaatgggggttccccgcgcaggt

SEQ ID NO: 38009 - DNA, 26 bp, Artificial Sequence
  Probe
actcgaaatccaatggggtctccccg

SEQ ID NO: 38010 - DNA, 31 bp, Artificial Sequence
  Probe
actcgaaatccaatggggtttccccgcacag

SEQ ID NO: 38011 - DNA, 18 bp, Artificial Sequence
  Probe
actctgaatccagcgatc

SEQ ID NO: 38012 - DNA, 19 bp, Artificial Sequence
  Probe
actctgaatccagcgatcc

SEQ ID NO: 38013 - DNA, 39 bp, Artificial Sequence
  Probe
actctgaatccagcgatccgagttcaaatctcggtggaa

SEQ ID NO: 38014 - DNA, 45 bp, Artificial Sequence
  Probe
actctgaatccagcgatccgagttcaaatctcggtggaacctgca

SEQ ID NO: 38015 - DNA, 39 bp, Artificial Sequence
  Probe
actctgaatccagcgatccgagttcaagtctcggtggaa

SEQ ID NO: 38016 - DNA, 42 bp, Artificial Sequence
  Probe
actctgaatccagcgatccgagttcaagtctcggtggaacct

SEQ ID NO: 38017 - DNA, 45 bp, Artificial Sequence
  Probe
actctgaatccagcgatccgagttcaagtctcggtggaacctgct

SEQ ID NO: 38018 - DNA, 45 bp, Artificial Sequence
  Probe
actctgaatccagcgatccgagttcgagtctcggtggaacctttg

SEQ ID NO: 38019 - DNA, 22 bp, Artificial Sequence
  Probe
actctgaatccggtaatccgag

SEQ ID NO: 38020 - DNA, 20 bp, Artificial Sequence
  Probe
actcttaatcccagggtcgt

SEQ ID NO: 38021 - DNA, 21 bp, Artificial Sequence
  Probe
actcttaatcccagggtcgtg

SEQ ID NO: 38022 - DNA, 22 bp, Artificial Sequence
  Probe
actcttaatcccagggtcgtgg

SEQ ID NO: 38023 - DNA, 46 bp, Artificial Sequence
  Probe
actcttaatcccagggtcgtgggttcgagccccacgttgggcgggt

SEQ ID NO: 38024 - DNA, 19 bp, Artificial Sequence
  Probe
actcttaatctcagggtcg

SEQ ID NO: 38025 - DNA, 20 bp, Artificial Sequence
  Probe
actcttaatctcagggtcgt

SEQ ID NO: 38026 - DNA, 21 bp, Artificial Sequence
  Probe
actcttaatctcagggtcgtg

SEQ ID NO: 38027 - DNA, 22 bp, Artificial Sequence
  Probe
actcttaatctcagggtcgtgg

SEQ ID NO: 38028 - DNA, 23 bp, Artificial Sequence
  Probe
actcttaatctcagggtcgtggg

SEQ ID NO: 38029 - DNA, 24 bp, Artificial Sequence
  Probe
actcttaatctcagggtcgtgggt

SEQ ID NO: 38030 - DNA, 26 bp, Artificial Sequence
  Probe
actcttaatctcagggtcgtgggttc

SEQ ID NO: 38031 - DNA, 41 bp, Artificial Sequence
  Probe
actcttaatctcagggtcgtgggttcgagccccacgttggg

SEQ ID NO: 38032 - DNA, 42 bp, Artificial Sequence
  Probe
actcttaatctcagggtcgtgggttcgagccccacgttgggc

SEQ ID NO: 38033 - DNA, 50 bp, Artificial Sequence
  Probe
actcttaatctcagggtcgtgggttcgagccccacgttgggcgattcctt

SEQ ID NO: 38034 - DNA, 46 bp, Artificial Sequence
  Probe
actcttaatctcagggtcgtgggttcgagccccacgttgggcgctg

SEQ ID NO: 38035 - DNA, 49 bp, Artificial Sequence
  Probe
actcttaatctcagggtcgtgggttcgagccccacgttgggcgctgtgt

SEQ ID NO: 38036 - DNA, 50 bp, Artificial Sequence
  Probe
actcttaatctcagggtcgtgggttcgagccccacgttgggcgctgtgtt

SEQ ID NO: 38037 - DNA, 46 bp, Artificial Sequence
  Probe
actcttaatctcagggtcgtgggttcgagccccacgttgggcggca

SEQ ID NO: 38038 - DNA, 50 bp, Artificial Sequence
  Probe
actcttaatctcagggtcgtgggttcgagccccacgttgggcggcaactg

SEQ ID NO: 38039 - DNA, 33 bp, Artificial Sequence; identical to SEQ ID NO: 196
  Probe

SEQ ID NO: 38040 - DNA, 42 bp, Artificial Sequence; identical to SEQ ID NO: 2937
  Probe

SEQ ID NO: 38041 - DNA, 43 bp, Artificial Sequence; identical to SEQ ID NO: 2938
  Probe

SEQ ID NO: 38042 - DNA, 44 bp, Artificial Sequence; identical to SEQ ID NO: 2939
  Probe

SEQ ID NO: 38043 - DNA, 45 bp, Artificial Sequence; identical to SEQ ID NO: 2940
  Probe

SEQ ID NO: 38044 - DNA, 18 bp, Artificial Sequence
  Probe
actgaagatctaaaggtc

SEQ ID NO: 38045 - DNA, 20 bp, Artificial Sequence
  Probe
actgaagatctaaaggtccc

SEQ ID NO: 38046 - DNA, 21 bp, Artificial Sequence
  Probe
actgaagatctaaaggtccct

SEQ ID NO: 38047 - DNA, 22 bp, Artificial Sequence
  Probe
actgaagatctaaaggtccctg

SEQ ID NO: 38048 - DNA, 23 bp, Artificial Sequence
  Probe
actgaagatctaaaggtccctgg

SEQ ID NO: 38049 - DNA, 20 bp, Artificial Sequence
  Probe
actgcagatcaagaggtccc

SEQ ID NO: 38050 - DNA, 21 bp, Artificial Sequence
  Probe
actgcagatcaagaggtcccc

SEQ ID NO: 38051 - DNA, 22 bp, Artificial Sequence
  Probe
actgcagatcaagaggtccccg

SEQ ID NO: 38052 - DNA, 22 bp, Artificial Sequence
  Probe
actgcagatcaagaggtccctg

SEQ ID NO: 38053 - DNA, 23 bp, Artificial Sequence
  Probe
actgcagatcaagaggtccctgg

SEQ ID NO: 38054 - DNA, 45 bp, Artificial Sequence; identical to SEQ ID NO: 2955
  Probe

SEQ ID NO: 38055 - DNA, 46 bp, Artificial Sequence; identical to SEQ ID NO: 2956
  Probe

SEQ ID NO: 38056 - DNA, 46 bp, Artificial Sequence; identical to SEQ ID NO: 2970
  Probe

SEQ ID NO: 38057 - DNA, 19 bp, Artificial Sequence
  Probe
acttaacttgaccgctctg

SEQ ID NO: 38058 - DNA, 20 bp, Artificial Sequence
  Probe
acttaacttgaccgctctga

SEQ ID NO: 38059 - DNA, 23 bp, Artificial Sequence
  Probe
acttaacttgaccgctctgagct

SEQ ID NO: 38060 - DNA, 21 bp, Artificial Sequence
  Probe
acttacacttaggagatttca

SEQ ID NO: 38061 - DNA, 22 bp, Artificial Sequence
  Probe
acttacacttaggagatttcaa

SEQ ID NO: 38062 - DNA, 37 bp, Artificial Sequence; identical to SEQ ID NO: 2984
  Probe

SEQ ID NO: 38063 - DNA, 43 bp, Artificial Sequence; identical to SEQ ID NO: 2989
  Probe

SEQ ID NO: 38064 - DNA, 44 bp, Artificial Sequence; identical to SEQ ID NO: 2990
  Probe

SEQ ID NO: 38065 - DNA, 45 bp, Artificial Sequence; identical to SEQ ID NO: 2991
  Probe

SEQ ID NO: 38066 - DNA, 46 bp, Artificial Sequence
  Probe
acttacacttaggagatttcaacttaacttgaccgctctgagctaa

SEQ ID NO: 38067 - DNA, 50 bp, Artificial Sequence; identical to SEQ ID NO: 201
  Probe

SEQ ID NO: 38068 - DNA, 37 bp, Artificial Sequence; identical to SEQ ID NO: 3004
  Probe

SEQ ID NO: 38069 - DNA, 38 bp, Artificial Sequence; identical to SEQ ID NO: 3005
  Probe

SEQ ID NO: 38070 - DNA, 39 bp, Artificial Sequence; identical to SEQ ID NO: 3006
  Probe

SEQ ID NO: 38071 - DNA, 21 bp, Artificial Sequence
  Probe
acttccaattaactagttttg

SEQ ID NO: 38072 - DNA, 22 bp, Artificial Sequence
  Probe
acttccaattaactagttttga

SEQ ID NO: 38073 - DNA, 43 bp, Artificial Sequence; identical to SEQ ID NO: 3009
  Probe

SEQ ID NO: 38074 - DNA, 44 bp, Artificial Sequence; identical to SEQ ID NO: 3010
  Probe

SEQ ID NO: 38075 - DNA, 46 bp, Artificial Sequence
  Probe
acttcggatcagaagattgcaggttcgagtcctgccgcggtcgaag

SEQ ID NO: 38076 - DNA, 21 bp, Artificial Sequence
  Probe
acttctgacacaactatctta

SEQ ID NO: 38077 - DNA, 23 bp, Artificial Sequence
  Probe
acttctgacacaactatcttatt

SEQ ID NO: 38078 - DNA, 23 bp, Artificial Sequence
  Probe
acttctgacacagcctgatcttt

SEQ ID NO: 38079 - DNA, 18 bp, Artificial Sequence
  Probe
acttctgacacatacttt

SEQ ID NO: 38080 - DNA, 25 bp, Artificial Sequence
  Probe
acttctgacagagctcaattacttt

SEQ ID NO: 38081 - DNA, 28 bp, Artificial Sequence
  Probe
acttgaaatccattggggtctccccgcg

SEQ ID NO: 38082 - DNA, 30 bp, Artificial Sequence
  Probe
acttgaaatccattggggtctccccgcgca

SEQ ID NO: 38083 - DNA, 31 bp, Artificial Sequence
  Probe
acttgaaatccattggggtctccccgcgcag

SEQ ID NO: 38084 - DNA, 31 bp, Artificial Sequence
  Probe
acttgaaatccattggggtttccccgcgcag

SEQ ID NO: 38085 - DNA, 20 bp, Artificial Sequence
  Probe
acttgctggggtggcggttt

SEQ ID NO: 38086 - DNA, 33 bp, Artificial Sequence; identical to SEQ ID NO: 3015
  Probe

SEQ ID NO: 38087 - DNA, 35 bp, Artificial Sequence; identical to SEQ ID NO: 3016
  Probe

SEQ ID NO: 38088 - DNA, 36 bp, Artificial Sequence; identical to SEQ ID NO: 16031
  Probe

SEQ ID NO: 38089 - DNA, 38 bp, Artificial Sequence; identical to SEQ ID NO: 3018
  Probe

SEQ ID NO: 38090 - DNA, 21 bp, Artificial Sequence
  Probe
actttgaatccagcaatccga

SEQ ID NO: 38091 - DNA, 23 bp, Artificial Sequence
  Probe
actttgaatccagcaatccgagt

SEQ ID NO: 38092 - DNA, 18 bp, Artificial Sequence
  Probe
actttgaatccagcgatc

SEQ ID NO: 38093 - DNA, 23 bp, Artificial Sequence
  Probe
actttgaatccagcgatccgagt

SEQ ID NO: 38094 - DNA, 42 bp, Artificial Sequence
  Probe
actttgaatccagcgatccgagttcaaatctcggtgggacct

SEQ ID NO: 38095 - DNA, 45 bp, Artificial Sequence
  Probe
actttgaatccagcgatccgagttcaaatctcggtgggacctcac

SEQ ID NO: 38096 - DNA, 50 bp, Artificial Sequence; identical to SEQ ID NO: 3033
  Probe

SEQ ID NO: 38097 - DNA, 31 bp, Artificial Sequence; identical to SEQ ID NO: 210
  Probe

SEQ ID NO: 38098 - DNA, 32 bp, Artificial Sequence; identical to SEQ ID NO: 211
  Probe

SEQ ID NO: 38099 - DNA, 33 bp, Artificial Sequence; identical to SEQ ID NO: 3035
  Probe

SEQ ID NO: 38100 - DNA, 34 bp, Artificial Sequence; identical to SEQ ID NO: 212
  Probe

SEQ ID NO: 38101 - DNA, 17 bp, Artificial Sequence
  Probe
acttttaatctgagggt

SEQ ID NO: 38102 - DNA, 26 bp, Artificial Sequence
  Probe
acttttaatctgagggtccagggttc

SEQ ID NO: 38103 - DNA, 27 bp, Artificial Sequence
  Probe
acttttaatctgagggtccagggttca

SEQ ID NO: 38104 - DNA, 46 bp, Artificial Sequence
  Probe
acttttaatctgagggtccagggttcaagtccctgtccaggcgcta

SEQ ID NO: 38105 - DNA, 46 bp, Artificial Sequence
  Probe
acttttaatctgagggtccagggttcaagtccctgttcaggcatgt

SEQ ID NO: 38106 - DNA, 46 bp, Artificial Sequence
  Probe
acttttaatctgagggtccagggttcaagtccctgttcaggcgaac

SEQ ID NO: 38107 - DNA, 42 bp, Artificial Sequence
  Probe
acttttaatctgagggtccagggttcaagtccctgttcgggc

SEQ ID NO: 38108 - DNA, 46 bp, Artificial Sequence
  Probe
acttttaatctgagggtccagggttcaagtccctgttcgggcggca

SEQ ID NO: 38109 - DNA, 50 bp, Artificial Sequence
  Probe
acttttaatctgagggtccagggttcaagtccctgttcgggcggcatgtc

SEQ ID NO: 38110 - DNA, 50 bp, Artificial Sequence
  Probe
acttttaatctgagggtccagggttcaagtccctgttcgggcggtatctt

SEQ ID NO: 38111 - DNA, 50 bp, Artificial Sequence
  Probe
acttttaatctgagggtccagggttcaagtccctgttcgggcgtcttgtt

SEQ ID NO: 38112 - DNA, 29 bp, Artificial Sequence
  Probe
agaaagctcacaagaactgctaactcatg

SEQ ID NO: 38113 - DNA, 50 bp, Artificial Sequence; identical to SEQ ID NO: 3052
  Probe

SEQ ID NO: 38114 - DNA, 23 bp, Artificial Sequence
  Probe
agaaccaacacctctttacagtg

SEQ ID NO: 38115 - DNA, 27 bp, Artificial Sequence
  Probe
agaaccaacacctctttacagtgaaat

SEQ ID NO: 38116 - DNA, 45 bp, Artificial Sequence; identical to SEQ ID NO: 223
  Probe

SEQ ID NO: 38117 - DNA, 50 bp, Artificial Sequence; identical to SEQ ID NO: 3070
  Probe

SEQ ID NO: 38118 - DNA, 29 bp, Artificial Sequence
  Probe
agaagattgagggttcgagtcccttcgtg

SEQ ID NO: 38119 - DNA, 30 bp, Artificial Sequence; identical to SEQ ID NO: 16111
  Probe

SEQ ID NO: 38120 - DNA, 31 bp, Artificial Sequence; identical to SEQ ID NO: 230
  Probe

SEQ ID NO: 38121 - DNA, 36 bp, Artificial Sequence; identical to SEQ ID NO: 3082
  Probe

SEQ ID NO: 38122 - DNA, 50 bp, Artificial Sequence
  Probe
agaagattgagggttcgagtcccttcgtggtcgttgccatgttaacgttt

SEQ ID NO: 38123 - DNA, 31 bp, Artificial Sequence; identical to SEQ ID NO: 3091
  Probe

SEQ ID NO: 38124 - DNA, 31 bp, Artificial Sequence; identical to SEQ ID NO: 12641
  Probe

SEQ ID NO: 38125 - DNA, 36 bp, Artificial Sequence; identical to SEQ ID NO: 3096
  Probe

SEQ ID NO: 38126 - DNA, 29 bp, Artificial Sequence
  Probe
agaatcttagctttgggtgctaatggtgg

SEQ ID NO: 38127 - DNA, 34 bp, Artificial Sequence; identical to SEQ ID NO: 3098
  Probe

SEQ ID NO: 38128 - DNA, 29 bp, Artificial Sequence
  Probe
agacccgaggtagggctttggctgtgggg

SEQ ID NO: 38129 - DNA, 29 bp, Artificial Sequence
  Probe
agacccttttggatgttcgcaaccccttt

SEQ ID NO: 38130 - DNA, 23 bp, Artificial Sequence
  Probe
agaccggggttcaattccccgac

SEQ ID NO: 38131 - DNA, 27 bp, Artificial Sequence
  Probe
agaccggggttcaattccccgacgggg

SEQ ID NO: 38132 - DNA, 26 bp, Artificial Sequence
  Probe
agaccggggttcgattccccgacggg

SEQ ID NO: 38133 - DNA, 28 bp, Artificial Sequence
  Probe
agaccggggttcgattccccgacgggga

SEQ ID NO: 38134 - DNA, 30 bp, Artificial Sequence; identical to SEQ ID NO: 3114
  Probe

SEQ ID NO: 38135 - DNA, 32 bp, Artificial Sequence; identical to SEQ ID NO: 3122
  Probe

SEQ ID NO: 38136 - DNA, 20 bp, Artificial Sequence
  Probe
agacgggctcacatcacccc

SEQ ID NO: 38137 - DNA, 21 bp, Artificial Sequence
  Probe
agacgggctcacatcacccca

SEQ ID NO: 38138 - DNA, 22 bp, Artificial Sequence
  Probe
agacgggctcacatcaccccat

SEQ ID NO: 38139 - DNA, 23 bp, Artificial Sequence
  Probe
agacgggctcacatcaccccata

SEQ ID NO: 38140 - DNA, 26 bp, Artificial Sequence
  Probe
agacgggctcacatcaccccataaac

SEQ ID NO: 38141 - DNA, 27 bp, Artificial Sequence
  Probe
agacgggctcacatcaccccataaaca

SEQ ID NO: 38142 - DNA, 29 bp, Artificial Sequence
  Probe
agacgggctcacatcaccccataaacaaa

SEQ ID NO: 38143 - DNA, 30 bp, Artificial Sequence; identical to SEQ ID NO: 3135
  Probe

SEQ ID NO: 38144 - DNA, 45 bp, Artificial Sequence
  Probe
agagaaattcaaaggttgtgggttcgagtcccaccagagtcgctt

SEQ ID NO: 38145 - DNA, 29 bp, Artificial Sequence
  Probe
agagaaccaacacctctttacagtgaaat

SEQ ID NO: 38146 - DNA, 50 bp, Artificial Sequence
  Probe
agagcaatgccgaggttgtgagttcgagcctcacctggagcaagaccctt

SEQ ID NO: 38147 - DNA, 34 bp, Artificial Sequence; identical to SEQ ID NO: 16204
  Probe

SEQ ID NO: 38148 - DNA, 34 bp, Artificial Sequence; identical to SEQ ID NO: 16211
  Probe

SEQ ID NO: 38149 - DNA, 50 bp, Artificial Sequence; identical to SEQ ID NO: 3146
  Probe

SEQ ID NO: 38150 - DNA, 50 bp, Artificial Sequence
  Probe
agagcgcatgcttagcatgcatgaggtcccgggttcgatccccagcatct

SEQ ID NO: 38151 - DNA, 50 bp, Artificial Sequence
  Probe
agagcgcatgcttcgcatgtacgaggtccctggttcaatccctggtacct

SEQ ID NO: 38152 - DNA, 36 bp, Artificial Sequence; identical to SEQ ID NO: 16229
  Probe

SEQ ID NO: 38153 - DNA, 37 bp, Artificial Sequence; identical to SEQ ID NO: 16230
  Probe

SEQ ID NO: 38154 - DNA, 29 bp, Artificial Sequence
  Probe
agaggagttgtttttcctggcaaaaacct

SEQ ID NO: 38155 - DNA, 33 bp, Artificial Sequence; identical to SEQ ID NO: 27660
  Probe

SEQ ID NO: 38156 - DNA, 34 bp, Artificial Sequence; identical to SEQ ID NO: 27661
  Probe

SEQ ID NO: 38157 - DNA, 20 bp, Artificial Sequence
  Probe
agagggggcagctgccattt

SEQ ID NO: 38158 - DNA, 21 bp, Artificial Sequence
  Probe
agagggggcagctgccatttt

SEQ ID NO: 38159 - DNA, 32 bp, Artificial Sequence
  Probe
agagggggtatagctcagtggtagagcatttg

SEQ ID NO: 38160 - DNA, 30 bp, Artificial Sequence; identical to SEQ ID NO: 16236
  Probe

SEQ ID NO: 38161 - DNA, 30 bp, Artificial Sequence; identical to SEQ ID NO: 16238
  Probe

SEQ ID NO: 38162 - DNA, 31 bp, Artificial Sequence; identical to SEQ ID NO: 16239
  Probe

SEQ ID NO: 38163 - DNA, 38 bp, Artificial Sequence; identical to SEQ ID NO: 3157
  Probe

SEQ ID NO: 38164 - DNA, 33 bp, Artificial Sequence
  Probe
agatcctgggttcgactcccagcggggccttgg

SEQ ID NO: 38165 - DNA, 28 bp, Artificial Sequence
  Probe
agatgaaaacctttttccaaggacaaat

SEQ ID NO: 38166 - DNA, 34 bp, Artificial Sequence; identical to SEQ ID NO: 16282
  Probe

SEQ ID NO: 38167 - DNA, 31 bp, Artificial Sequence; identical to SEQ ID NO: 3175
  Probe

SEQ ID NO: 38168 - DNA, 32 bp, Artificial Sequence; identical to SEQ ID NO: 3176
  Probe

SEQ ID NO: 38169 - DNA, 35 bp, Artificial Sequence; identical to SEQ ID NO: 3179
  Probe

SEQ ID NO: 38170 - DNA, 24 bp, Artificial Sequence
  Probe
agattgagggttcgagtcccttcg

SEQ ID NO: 38171 - DNA, 27 bp, Artificial Sequence
  Probe
agattgagggttcgagtcccttcgtgg

SEQ ID NO: 38172 - DNA, 28 bp, Artificial Sequence
  Probe
agattgagggttcgagtcccttcgtggt

SEQ ID NO: 38173 - DNA, 29 bp, Artificial Sequence
  Probe
agattgagggttcgagtcccttcgtggtc

SEQ ID NO: 38174 - DNA, 30 bp, Artificial Sequence; identical to SEQ ID NO: 9106
  Probe

SEQ ID NO: 38175 - DNA, 33 bp, Artificial Sequence; identical to SEQ ID NO: 3191
  Probe

SEQ ID NO: 38176 - DNA, 50 bp, Artificial Sequence
  Probe
agattgagggttcgagtcccttcgtggtcgttgccatgttaacgttttct

SEQ ID NO: 38177 - DNA, 36 bp, Artificial Sequence
  Probe
agattggtggttcgagcccacccagggacgcttatt

SEQ ID NO: 38178 - DNA, 27 bp, Artificial Sequence
  Probe
agatttcaacttaacttgaccgctctg

SEQ ID NO: 38179 - DNA, 28 bp, Artificial Sequence
  Probe
agatttcaacttaacttgaccgctctga

SEQ ID NO: 38180 - DNA, 30 bp, Artificial Sequence; identical to SEQ ID NO: 3214
  Probe

SEQ ID NO: 38181 - DNA, 31 bp, Artificial Sequence; identical to SEQ ID NO: 3215
  Probe

SEQ ID NO: 38182 - DNA, 34 bp, Artificial Sequence; identical to SEQ ID NO: 3219
  Probe

SEQ ID NO: 38183 - DNA, 34 bp, Artificial Sequence; identical to SEQ ID NO: 3221
  Probe

SEQ ID NO: 38184 - DNA, 50 bp, Artificial Sequence; identical to SEQ ID NO: 3229
  Probe

SEQ ID NO: 38185 - DNA, 50 bp, Artificial Sequence
  Probe
agcaatgccgaggttgtgagttcgagcctcacctggagcaagaccctttt

SEQ ID NO: 38186 - DNA, 29 bp, Artificial Sequence
  Probe
agcacccaacttacacttaggagatttca

SEQ ID NO: 38187 - DNA, 45 bp, Artificial Sequence; identical to SEQ ID NO: 3248
  Probe

SEQ ID NO: 38188 - DNA, 50 bp, Artificial Sequence; identical to SEQ ID NO: 3251
  Probe

SEQ ID NO: 38189 - DNA, 30 bp, Artificial Sequence; identical to SEQ ID NO: 270
  Probe

SEQ ID NO: 38190 - DNA, 50 bp, Artificial Sequence; identical to SEQ ID NO: 272
  Probe

SEQ ID NO: 38191 - DNA, 33 bp, Artificial Sequence; identical to SEQ ID NO: 12675
  Probe

SEQ ID NO: 38192 - DNA, 27 bp, Artificial Sequence
  Probe
agcacttccacaagtacatttccttat

SEQ ID NO: 38193 - DNA, 28 bp, Artificial Sequence
  Probe
agcagagtggcgcagcggaagcgtgctg

SEQ ID NO: 38194 - DNA, 30 bp, Artificial Sequence; identical to SEQ ID NO: 8539
  Probe

SEQ ID NO: 38195 - DNA, 49 bp, Artificial Sequence
  Probe
agcagagtggcgcagcggaagcgtgctgggcccataacccagaggtcga

SEQ ID NO: 38196 - DNA, 50 bp, Artificial Sequence; identical to SEQ ID NO: 3258
  Probe

SEQ ID NO: 38197 - DNA, 21 bp, Artificial Sequence
  Probe
agcagggttgtttccgtagtg

SEQ ID NO: 38198 - DNA, 42 bp, Artificial Sequence
  Probe
agcagttaacgcgggttcgattcccgggtaacgaaacgtttt

SEQ ID NO: 38199 - DNA, 36 bp, Artificial Sequence; identical to SEQ ID NO: 27773
  Probe

SEQ ID NO: 38200 - DNA, 34 bp, Artificial Sequence
  Probe
agcagttgacccgggttcgattcccggccaacgc

SEQ ID NO: 38201 - DNA, 30 bp, Artificial Sequence; identical to SEQ ID NO: 3263
  Probe

SEQ ID NO: 38202 - DNA, 31 bp, Artificial Sequence; identical to SEQ ID NO: 12686
  Probe

SEQ ID NO: 38203 - DNA, 50 bp, Artificial Sequence; identical to SEQ ID NO: 3264
  Probe

SEQ ID NO: 38204 - DNA, 35 bp, Artificial Sequence; identical to SEQ ID NO: 280
  Probe

SEQ ID NO: 38205 - DNA, 36 bp, Artificial Sequence; identical to SEQ ID NO: 281
  Probe

SEQ ID NO: 38206 - DNA, 50 bp, Artificial Sequence; identical to SEQ ID NO: 3281
  Probe

SEQ ID NO: 38207 - DNA, 30 bp, Artificial Sequence; identical to SEQ ID NO: 9139
  Probe

SEQ ID NO: 38208 - DNA, 50 bp, Artificial Sequence
  Probe
agccagcagagtggcgcagcggaagcgtgctgggcccataacccagaggt

SEQ ID NO: 38209 - DNA, 50 bp, Artificial Sequence
  Probe
agccagggattgtgggttcgagtcccatctggggtggcctgtgacttttg

SEQ ID NO: 38210 - DNA, 27 bp, Artificial Sequence
  Probe
agcccacccagggacgcgctctccttt

SEQ ID NO: 38211 - DNA, 30 bp, Artificial Sequence
  Probe
agcccacccagggacggtcagtgcttcttt

SEQ ID NO: 38212 - DNA, 21 bp, Artificial Sequence
  Probe
agccccaaacccactccacct

SEQ ID NO: 38213 - DNA, 37 bp, Artificial Sequence; identical to SEQ ID NO: 16430
  Probe

SEQ ID NO: 38214 - DNA, 50 bp, Artificial Sequence; identical to SEQ ID NO: 3296
  Probe

SEQ ID NO: 38215 - DNA, 36 bp, Artificial Sequence; identical to SEQ ID NO: 27802
  Probe

SEQ ID NO: 38216 - DNA, 27 bp, Artificial Sequence
  Probe
agcctcacacggggcagtctaacgttt

SEQ ID NO: 38217 - DNA, 37 bp, Artificial Sequence
  Probe
agcctggatagctcagtcggtagagcatcagactttt

SEQ ID NO: 38218 - DNA, 29 bp, Artificial Sequence
  Probe
agcgatccgagttcaaatctcggtggaac

SEQ ID NO: 38219 - DNA, 30 bp, Artificial Sequence; identical to SEQ ID NO: 16462
  Probe

SEQ ID NO: 38220 - DNA, 34 bp, Artificial Sequence; identical to SEQ ID NO: 3303
  Probe

SEQ ID NO: 38221 - DNA, 29 bp, Artificial Sequence
  Probe
agcgatccgagttcaaatctcggtgggac

SEQ ID NO: 38222 - DNA, 34 bp, Artificial Sequence; identical to SEQ ID NO: 3306
  Probe

SEQ ID NO: 38223 - DNA, 30 bp, Artificial Sequence
  Probe
agcgatccgagttcaagtctcggtggaacc

SEQ ID NO: 38224 - DNA, 50 bp, Artificial Sequence
  Probe
agcgcatgcttcgcatgtacgaggtccctggttcaatccctggtacctcc

SEQ ID NO: 38225 - DNA, 29 bp, Artificial Sequence
  Probe
agcgccgctggtgtagtggtatcatgcaa

SEQ ID NO: 38226 - DNA, 30 bp, Artificial Sequence; identical to SEQ ID NO: 16478
  Probe

SEQ ID NO: 38227 - DNA, 35 bp, Artificial Sequence
  Probe
agcggaagcgtgctgggcccataacccagaggtcg

SEQ ID NO: 38228 - DNA, 27 bp, Artificial Sequence
  Probe
agcgtgctgctactaatgccagggtcg

SEQ ID NO: 38229 - DNA, 30 bp, Artificial Sequence
  Probe
agcgttggtggtatagtggtaagcatagct

SEQ ID NO: 38230 - DNA, 31 bp, Artificial Sequence
  Probe
agcgttggtggtatagtggtaagcatagctg

SEQ ID NO: 38231 - DNA, 26 bp, Artificial Sequence
  Probe
agctaaataagctatcgggcccatac

SEQ ID NO: 38232 - DNA, 50 bp, Artificial Sequence; identical to SEQ ID NO: 3325
  Probe

SEQ ID NO: 38233 - DNA, 34 bp, Artificial Sequence
  Probe
agctaagcttcctccgcggtggggattctggtct

SEQ ID NO: 38234 - DNA, 21 bp, Artificial Sequence
  Probe
agctatcgggcccataccccg

SEQ ID NO: 38235 - DNA, 24 bp, Artificial Sequence
  Probe
agctatcgggcccataccccgaaa

SEQ ID NO: 38236 - DNA, 29 bp, Artificial Sequence
  Probe
agctatcgggcccataccccgaaaatgtt

SEQ ID NO: 38237 - DNA, 30 bp, Artificial Sequence; identical to SEQ ID NO: 3337
  Probe

SEQ ID NO: 38238 - DNA, 31 bp, Artificial Sequence; identical to SEQ ID NO: 3338
  Probe

SEQ ID NO: 38239 - DNA, 33 bp, Artificial Sequence; identical to SEQ ID NO: 3340
  Probe

SEQ ID NO: 38240 - DNA, 34 bp, Artificial Sequence; identical to SEQ ID NO: 3341
  Probe

SEQ ID NO: 38241 - DNA, 50 bp, Artificial Sequence; identical to SEQ ID NO: 303
  Probe

SEQ ID NO: 38242 - DNA, 25 bp, Artificial Sequence
  Probe
agctcacaagaactgctaactcatg

SEQ ID NO: 38243 - DNA, 28 bp, Artificial Sequence
  Probe
agctcagtcggtagagcatcagactttt

SEQ ID NO: 38244 - DNA, 50 bp, Artificial Sequence; identical to SEQ ID NO: 3374
  Probe

SEQ ID NO: 38245 - DNA, 34 bp, Artificial Sequence; identical to SEQ ID NO: 12717
  Probe

SEQ ID NO: 38246 - DNA, 18 bp, Artificial Sequence
  Probe
agctggtagagcggagga

SEQ ID NO: 38247 - DNA, 21 bp, Artificial Sequence
  Probe
agctggtagagcggaggactg

SEQ ID NO: 38248 - DNA, 24 bp, Artificial Sequence
  Probe
agctggtagagcggaggactgtag

SEQ ID NO: 38249 - DNA, 42 bp, Artificial Sequence; identical to SEQ ID NO: 12719
  Probe

SEQ ID NO: 38250 - DNA, 33 bp, Artificial Sequence; identical to SEQ ID NO: 16593
  Probe

SEQ ID NO: 38251 - DNA, 35 bp, Artificial Sequence; identical to SEQ ID NO: 16595
  Probe

SEQ ID NO: 38252 - DNA, 31 bp, Artificial Sequence; identical to SEQ ID NO: 3387
  Probe

SEQ ID NO: 38253 - DNA, 32 bp, Artificial Sequence; identical to SEQ ID NO: 3388
  Probe

SEQ ID NO: 38254 - DNA, 33 bp, Artificial Sequence; identical to SEQ ID NO: 3389
  Probe

SEQ ID NO: 38255 - DNA, 34 bp, Artificial Sequence; identical to SEQ ID NO: 3390
  Probe

SEQ ID NO: 38256 - DNA, 35 bp, Artificial Sequence; identical to SEQ ID NO: 3391
  Probe

SEQ ID NO: 38257 - DNA, 31 bp, Artificial Sequence
  Probe
aggacctcgtggcgcaacggtagcgcgtctg

SEQ ID NO: 38258 - DNA, 33 bp, Artificial Sequence; identical to SEQ ID NO: 3413
  Probe

SEQ ID NO: 38259 - DNA, 34 bp, Artificial Sequence; identical to SEQ ID NO: 3414
  Probe

SEQ ID NO: 38260 - DNA, 21 bp, Artificial Sequence
  Probe
aggatggccgagcggtctaag

SEQ ID NO: 38261 - DNA, 21 bp, Artificial Sequence
  Probe
aggatggccgagtggtctaag

SEQ ID NO: 38262 - DNA, 30 bp, Artificial Sequence; identical to SEQ ID NO: 16665
  Probe

SEQ ID NO: 38263 - DNA, 30 bp, Artificial Sequence; identical to SEQ ID NO: 16666
  Probe

SEQ ID NO: 38264 - DNA, 28 bp, Artificial Sequence
  Probe
aggccccgggttcaatccccggcacctc

SEQ ID NO: 38265 - DNA, 29 bp, Artificial Sequence
  Probe
aggccccgggttcaatccccggcacctcc

SEQ ID NO: 38266 - DNA, 28 bp, Artificial Sequence
  Probe
aggccccgggttcgatccccggcatctc

SEQ ID NO: 38267 - DNA, 33 bp, Artificial Sequence; identical to SEQ ID NO: 16671
  Probe

SEQ ID NO: 38268 - DNA, 22 bp, Artificial Sequence
  Probe
aggcccgggttcgattcccggc

SEQ ID NO: 38269 - DNA, 27 bp, Artificial Sequence
  Probe
aggcccgggttcgattcccggcccatg

SEQ ID NO: 38270 - DNA, 35 bp, Artificial Sequence
  Probe
aggcgcccggctagctcagtcggtagagcatggga

SEQ ID NO: 38271 - DNA, 50 bp, Artificial Sequence; identical to SEQ ID NO: 27977
  Probe

SEQ ID NO: 38272 - DNA, 30 bp, Artificial Sequence; identical to SEQ ID NO: 3426
  Probe

SEQ ID NO: 38273 - DNA, 31 bp, Artificial Sequence; identical to SEQ ID NO: 325
  Probe

SEQ ID NO: 38274 - DNA, 32 bp, Artificial Sequence; identical to SEQ ID NO: 326
  Probe

SEQ ID NO: 38275 - DNA, 50 bp, Artificial Sequence
  Probe
aggcggccggttagctcagttggttagagcgtggtgctaataacgccaag

SEQ ID NO: 38276 - DNA, 26 bp, Artificial Sequence
  Probe
aggcgtgggttcgaatcccacttctg

SEQ ID NO: 38277 - DNA, 25 bp, Artificial Sequence
  Probe
aggctaaatcctatatatcttaatg

SEQ ID NO: 38278 - DNA, 36 bp, Artificial Sequence; identical to SEQ ID NO: 16690
  Probe

SEQ ID NO: 38279 - DNA, 41 bp, Artificial Sequence; identical to SEQ ID NO: 16694
  Probe

SEQ ID NO: 38280 - DNA, 42 bp, Artificial Sequence; identical to SEQ ID NO: 16695
  Probe

SEQ ID NO: 38281 - DNA, 50 bp, Artificial Sequence
  Probe
agggagcccggatagctcagtcggtagagcatcagacttttaatctgagg

SEQ ID NO: 38282 - DNA, 22 bp, Artificial Sequence
  Probe
agggaggttatgattaactttt

SEQ ID NO: 38283 - DNA, 50 bp, Artificial Sequence
  Probe
agggaggttccatggtgtaatggttagcactctggactctgaatccagcg

SEQ ID NO: 38284 - DNA, 27 bp, Artificial Sequence
  Probe
agggattgtgggttcgagtcccatctg

SEQ ID NO: 38285 - DNA, 30 bp, Artificial Sequence; identical to SEQ ID NO: 16707
  Probe

SEQ ID NO: 38286 - DNA, 32 bp, Artificial Sequence; identical to SEQ ID NO: 3436
  Probe

SEQ ID NO: 38287 - DNA, 34 bp, Artificial Sequence
  Probe
agggcctggatagctcagttggtagaacatcaga

SEQ ID NO: 38288 - DNA, 38 bp, Artificial Sequence
  Probe
agggcctggatagctcagttggtagaacatcagacttt

SEQ ID NO: 38289 - DNA, 41 bp, Artificial Sequence; identical to SEQ ID NO: 16717
  Probe

SEQ ID NO: 38290 - DNA, 50 bp, Artificial Sequence
  Probe
aggggcccggatagctcagtcggtagagcatcagacttttaatctgaggg

SEQ ID NO: 38291 - DNA, 17 bp, Artificial Sequence
  Probe
aggggtatgattctcgc

SEQ ID NO: 38292 - DNA, 18 bp, Artificial Sequence
  Probe
aggggtatgattctcgct

SEQ ID NO: 38293 - DNA, 50 bp, Artificial Sequence
  Probe
aggggtcctttcgatagctcagttggtagagcggaggactgtaggttcat

SEQ ID NO: 38294 - DNA, 18 bp, Artificial Sequence
  Probe
aggggttagagcactggt

SEQ ID NO: 38295 - DNA, 29 bp, Artificial Sequence
  Probe
agggtccagggttcaagtccctgtccagg

SEQ ID NO: 38296 - DNA, 28 bp, Artificial Sequence
  Probe
agggtccagggttcaagtccctgttcag

SEQ ID NO: 38297 - DNA, 30 bp, Artificial Sequence
  Probe
agggtccagggttcaagtccctgttcaggc

SEQ ID NO: 38298 - DNA, 31 bp, Artificial Sequence
  Probe
agggtccagggttcaagtccctgttcaggcg

SEQ ID NO: 38299 - DNA, 34 bp, Artificial Sequence
  Probe
agggtccagggttcaagtccctgttcaggcgaac

SEQ ID NO: 38300 - DNA, 28 bp, Artificial Sequence
  Probe
agggtccagggttcaagtccctgttcgg

SEQ ID NO: 38301 - DNA, 31 bp, Artificial Sequence
  Probe
agggtccagggttcaagtccctgttcgggcg

SEQ ID NO: 38302 - DNA, 34 bp, Artificial Sequence; identical to SEQ ID NO: 16728
  Probe

SEQ ID NO: 38303 - DNA, 30 bp, Artificial Sequence; identical to SEQ ID NO: 9182
  Probe

SEQ ID NO: 38304 - DNA, 31 bp, Artificial Sequence; identical to SEQ ID NO: 333
  Probe

SEQ ID NO: 38305 - DNA, 34 bp, Artificial Sequence; identical to SEQ ID NO: 3445
  Probe

SEQ ID NO: 38306 - DNA, 18 bp, Artificial Sequence
  Probe
agggtgtgcgtgtttttt

SEQ ID NO: 38307 - DNA, 18 bp, Artificial Sequence
  Probe
agggttgtttccgtagtg

SEQ ID NO: 38308 - DNA, 28 bp, Artificial Sequence
  Probe
aggtagcgggatcgatgcccgcattctc

SEQ ID NO: 38309 - DNA, 29 bp, Artificial Sequence
  Probe
aggtagcgggatcgatgcccgcattctcc

SEQ ID NO: 38310 - DNA, 34 bp, Artificial Sequence
  Probe
aggtagcgggatcgatgcccgcattctccagttt

SEQ ID NO: 38311 - DNA, 24 bp, Artificial Sequence
  Probe
aggtcagctaaataagctatcggg

SEQ ID NO: 38312 - DNA, 30 bp, Artificial Sequence; identical to SEQ ID NO: 3454
  Probe

SEQ ID NO: 38313 - DNA, 31 bp, Artificial Sequence; identical to SEQ ID NO: 3455
  Probe

SEQ ID NO: 38314 - DNA, 45 bp, Artificial Sequence; identical to SEQ ID NO: 3469
  Probe

SEQ ID NO: 38315 - DNA, 50 bp, Artificial Sequence; identical to SEQ ID NO: 3474
  Probe

SEQ ID NO: 38316 - DNA, 37 bp, Artificial Sequence
  Probe
aggtccccggttcgaaactgggcggaaacagaggttt

SEQ ID NO: 38317 - DNA, 27 bp, Artificial Sequence
  Probe
aggtcccgggttcaaatcccggacgag

SEQ ID NO: 38318 - DNA, 29 bp, Artificial Sequence
  Probe
aggtcccgggttcaaatcccggacgagcc

SEQ ID NO: 38319 - DNA, 33 bp, Artificial Sequence; identical to SEQ ID NO: 16757
  Probe

SEQ ID NO: 38320 - DNA, 36 bp, Artificial Sequence
  Probe
aggtcccgggttcaaatcccggacgagcccctcttt

SEQ ID NO: 38321 - DNA, 28 bp, Artificial Sequence
  Probe
aggtcccgggttcgatccccagcatctc

SEQ ID NO: 38322 - DNA, 29 bp, Artificial Sequence
  Probe
aggtcccgggttcgatccccagcatctcc

SEQ ID NO: 38323 - DNA, 33 bp, Artificial Sequence; identical to SEQ ID NO: 3476
  Probe

SEQ ID NO: 38324 - DNA, 36 bp, Artificial Sequence
  Probe
aggtcccgggttcgatccccagcatctccagtgttt

SEQ ID NO: 38325 - DNA, 37 bp, Artificial Sequence
  Probe
aggtcccgggttcgatccccagcatctccagtgtttt

SEQ ID NO: 38326 - DNA, 28 bp, Artificial Sequence
  Probe
aggtcccgggttcgatccccggcatctc

SEQ ID NO: 38327 - DNA, 30 bp, Artificial Sequence
  Probe
aggtcccgggttcgatccccggcatctcca

SEQ ID NO: 38328 - DNA, 34 bp, Artificial Sequence; identical to SEQ ID NO: 16763
  Probe

SEQ ID NO: 38329 - DNA, 35 bp, Artificial Sequence
  Probe
aggtccctcctcgttagtatagtggtgagtatccc

SEQ ID NO: 38330 - DNA, 36 bp, Artificial Sequence; identical to SEQ ID NO: 28079
  Probe

SEQ ID NO: 38331 - DNA, 37 bp, Artificial Sequence
  Probe
aggtccctcctcgttagtatagtggtgagtatccccg

SEQ ID NO: 38332 - DNA, 38 bp, Artificial Sequence
  Probe
aggtccctcctcgttagtatagtggtgagtatccccgc

SEQ ID NO: 38333 - DNA, 41 bp, Artificial Sequence
  Probe
aggtccctcctcgttagtatagtggtgagtatccccgcctg

SEQ ID NO: 38334 - DNA, 42 bp, Artificial Sequence; identical to SEQ ID NO: 16765
  Probe

SEQ ID NO: 38335 - DNA, 43 bp, Artificial Sequence
  Probe
aggtccctcctcgttagtatagtggtgagtatccccgcctgtc

SEQ ID NO: 38336 - DNA, 50 bp, Artificial Sequence
  Probe
aggtccctcctcgttagtatagtggtgagtatccccgcctgtcacgcggg

SEQ ID NO: 38337 - DNA, 41 bp, Artificial Sequence; identical to SEQ ID NO: 16770
  Probe

SEQ ID NO: 38338 - DNA, 35 bp, Artificial Sequence
  Probe
aggtcctgggttcaatccccaatacctccaggttt

SEQ ID NO: 38339 - DNA, 28 bp, Artificial Sequence
  Probe
aggtcctgggttcgagccccagtggaac

SEQ ID NO: 38340 - DNA, 33 bp, Artificial Sequence; identical to SEQ ID NO: 3478
  Probe

SEQ ID NO: 38341 - DNA, 27 bp, Artificial Sequence
  Probe
aggtcgatggatcgaaaccatcctctg

SEQ ID NO: 38342 - DNA, 28 bp, Artificial Sequence
  Probe
aggtcgctggttcgaatccggctcgaag

SEQ ID NO: 38343 - DNA, 26 bp, Artificial Sequence
  Probe
aggtcgctggttcgattccggctcga

SEQ ID NO: 38344 - DNA, 29 bp, Artificial Sequence
  Probe
aggtcgctggttcgattccggctcgaagg

SEQ ID NO: 38345 - DNA, 45 bp, Artificial Sequence
  Probe
aggtcgctggttcgattccggctcgaaggacttcgtctgtaattt

SEQ ID NO: 38346 - DNA, 46 bp, Artificial Sequence
  Probe
aggtcgctggttcgattccggctcgaaggacttcgtctgtaatttt

SEQ ID NO: 38347 - DNA, 45 bp, Artificial Sequence
  Probe
aggtcgctggttcgattccggctcgaaggagacaagtgcggtttt

SEQ ID NO: 38348 - DNA, 17 bp, Artificial Sequence
  Probe
aggtgcctcgttagcgc

SEQ ID NO: 38349 - DNA, 29 bp, Artificial Sequence
  Probe
aggtggcccgggttcgactcccggtatgg

SEQ ID NO: 38350 - DNA, 30 bp, Artificial Sequence; identical to SEQ ID NO: 16804
  Probe

SEQ ID NO: 38351 - DNA, 31 bp, Artificial Sequence; identical to SEQ ID NO: 12739
  Probe

SEQ ID NO: 38352 - DNA, 35 bp, Artificial Sequence; identical to SEQ ID NO: 3490
  Probe

SEQ ID NO: 38353 - DNA, 50 bp, Artificial Sequence
  Probe
aggtggccggttagctcagttggttagagcgtggtgctaataacgccaag

SEQ ID NO: 38354 - DNA, 50 bp, Artificial Sequence; identical to SEQ ID NO: 16816
  Probe

SEQ ID NO: 38355 - DNA, 30 bp, Artificial Sequence; identical to SEQ ID NO: 16821
  Probe

SEQ ID NO: 38356 - DNA, 42 bp, Artificial Sequence
  Probe
aggttggtggttcgatcccacccagggacggaagtcgcattt

SEQ ID NO: 38357 - DNA, 34 bp, Artificial Sequence
  Probe
aggttgtgagttcgatcctcacctggagcacttt

SEQ ID NO: 38358 - DNA, 35 bp, Artificial Sequence
  Probe
aggttgtgagttcgatcctcacctggagcactttt

SEQ ID NO: 38359 - DNA, 32 bp, Artificial Sequence
  Probe
aggtttcgatccccgtacgggcctttggcttt

SEQ ID NO: 38360 - DNA, 21 bp, Artificial Sequence
  Probe
agtaaacaggagatcctgggt

SEQ ID NO: 38361 - DNA, 43 bp, Artificial Sequence
  Probe
agtaaacaggagatcctgggttcgactcccagcggggccttgg

SEQ ID NO: 38362 - DNA, 18 bp, Artificial Sequence
  Probe
agtaaggtcagctaaata

SEQ ID NO: 38363 - DNA, 22 bp, Artificial Sequence
  Probe
agtaaggtcagctaaataagct

SEQ ID NO: 38364 - DNA, 27 bp, Artificial Sequence
  Probe
agtaaggtcagctaaataagctatcgg

SEQ ID NO: 38365 - DNA, 28 bp, Artificial Sequence
  Probe
agtaaggtcagctaaataagctatcggg

SEQ ID NO: 38366 - DNA, 29 bp, Artificial Sequence
  Probe
agtaaggtcagctaaataagctatcgggc

SEQ ID NO: 38367 - DNA, 30 bp, Artificial Sequence; identical to SEQ ID NO: 3514
  Probe

SEQ ID NO: 38368 - DNA, 31 bp, Artificial Sequence; identical to SEQ ID NO: 3515
  Probe

SEQ ID NO: 38369 - DNA, 32 bp, Artificial Sequence; identical to SEQ ID NO: 3516
  Probe

SEQ ID NO: 38370 - DNA, 33 bp, Artificial Sequence; identical to SEQ ID NO: 3517
  Probe

SEQ ID NO: 38371 - DNA, 34 bp, Artificial Sequence; identical to SEQ ID NO: 3518
  Probe

SEQ ID NO: 38372 - DNA, 35 bp, Artificial Sequence; identical to SEQ ID NO: 3519
  Probe

SEQ ID NO: 38373 - DNA, 36 bp, Artificial Sequence; identical to SEQ ID NO: 3520
  Probe

SEQ ID NO: 38374 - DNA, 37 bp, Artificial Sequence; identical to SEQ ID NO: 3521
  Probe

SEQ ID NO: 38375 - DNA, 38 bp, Artificial Sequence; identical to SEQ ID NO: 3522
  Probe

SEQ ID NO: 38376 - DNA, 41 bp, Artificial Sequence; identical to SEQ ID NO: 3525
  Probe

SEQ ID NO: 38377 - DNA, 42 bp, Artificial Sequence; identical to SEQ ID NO: 3526
  Probe

SEQ ID NO: 38378 - DNA, 43 bp, Artificial Sequence; identical to SEQ ID NO: 3527
  Probe

SEQ ID NO: 38379 - DNA, 44 bp, Artificial Sequence; identical to SEQ ID NO: 3528
  Probe

SEQ ID NO: 38380 - DNA, 45 bp, Artificial Sequence; identical to SEQ ID NO: 3529
  Probe

SEQ ID NO: 38381 - DNA, 46 bp, Artificial Sequence; identical to SEQ ID NO: 3530
  Probe

SEQ ID NO: 38382 - DNA, 50 bp, Artificial Sequence; identical to SEQ ID NO: 3534
  Probe

SEQ ID NO: 38383 - DNA, 50 bp, Artificial Sequence; identical to SEQ ID NO: 337
  Probe

SEQ ID NO: 38384 - DNA, 30 bp, Artificial Sequence
  Probe
agtactagcagttttgaaacttctatcttt

SEQ ID NO: 38385 - DNA, 17 bp, Artificial Sequence
  Probe
agtatagtggtgagtat

SEQ ID NO: 38386 - DNA, 18 bp, Artificial Sequence
  Probe
agtatagtggtgagtatc

SEQ ID NO: 38387 - DNA, 20 bp, Artificial Sequence
  Probe
agtatagtggtgagtatccc

SEQ ID NO: 38388 - DNA, 21 bp, Artificial Sequence
  Probe
agtatagtggtgagtatcccc

SEQ ID NO: 38389 - DNA, 22 bp, Artificial Sequence
  Probe
agtatagtggtgagtatccccg

SEQ ID NO: 38390 - DNA, 23 bp, Artificial Sequence
  Probe
agtatagtggtgagtatccccgc

SEQ ID NO: 38391 - DNA, 20 bp, Artificial Sequence
  Probe
agtatagtggtgagtgtccc

SEQ ID NO: 38392 - DNA, 21 bp, Artificial Sequence
  Probe
agtatagtggttagtatcccc

SEQ ID NO: 38393 - DNA, 22 bp, Artificial Sequence
  Probe
agtatagtggttagtatccccg

SEQ ID NO: 38394 - DNA, 30 bp, Artificial Sequence; identical to SEQ ID NO: 12745
  Probe

SEQ ID NO: 38395 - DNA, 50 bp, Artificial Sequence; identical to SEQ ID NO: 3540
  Probe

SEQ ID NO: 38396 - DNA, 50 bp, Artificial Sequence; identical to SEQ ID NO: 3541
  Probe

SEQ ID NO: 38397 - DNA, 26 bp, Artificial Sequence
  Probe
agtcagaggttcaattcctcttctta

SEQ ID NO: 38398 - DNA, 29 bp, Artificial Sequence
  Probe
agtcagaggttcaattcctcttcttaaca

SEQ ID NO: 38399 - DNA, 32 bp, Artificial Sequence; identical to SEQ ID NO: 3546
  Probe

SEQ ID NO: 38400 - DNA, 33 bp, Artificial Sequence
  Probe
agtcccttcgtggtcgttgccatgttaacgttt

SEQ ID NO: 38401 - DNA, 19 bp, Artificial Sequence
  Probe
agtccgtgcgagaataatg

SEQ ID NO: 38402 - DNA, 23 bp, Artificial Sequence
  Probe
agtcggtagagcatcagactttt

SEQ ID NO: 38403 - DNA, 41 bp, Artificial Sequence
  Probe
agtcggtagagcatcagacttttaatctgagggtccagggt

SEQ ID NO: 38404 - DNA, 18 bp, Artificial Sequence
  Probe
agtcggtagagcatgaga

SEQ ID NO: 38405 - DNA, 19 bp, Artificial Sequence
  Probe
agtcggtagagcatgagac

SEQ ID NO: 38406 - DNA, 28 bp, Artificial Sequence
  Probe
agtcggtagagcatgagactcttaatct

SEQ ID NO: 38407 - DNA, 34 bp, Artificial Sequence
  Probe
agtcggtagagcatgagactcttaatctcagggt

SEQ ID NO: 38408 - DNA, 36 bp, Artificial Sequence; identical to SEQ ID NO: 346
  Probe

SEQ ID NO: 38409 - DNA, 39 bp, Artificial Sequence; identical to SEQ ID NO: 347
  Probe

SEQ ID NO: 38410 - DNA, 41 bp, Artificial Sequence; identical to SEQ ID NO: 3557
  Probe

SEQ ID NO: 38411 - DNA, 36 bp, Artificial Sequence; identical to SEQ ID NO: 354
  Probe

SEQ ID NO: 38412 - DNA, 30 bp, Artificial Sequence
  Probe
agtcggtagagcatgggactcttaatctca

SEQ ID NO: 38413 - DNA, 22 bp, Artificial Sequence
  Probe
agtctaggctgtcagctcttcc

SEQ ID NO: 38414 - DNA, 20 bp, Artificial Sequence
  Probe
agtctcataatctgaaggtc

SEQ ID NO: 38415 - DNA, 23 bp, Artificial Sequence
  Probe
agtctcataatctgaaggtcctg

SEQ ID NO: 38416 - DNA, 25 bp, Artificial Sequence
  Probe
agtctcataatctgaaggtcctgag

SEQ ID NO: 38417 - DNA, 23 bp, Artificial Sequence
  Probe
agtctcataatctgaaggtcgtg

SEQ ID NO: 38418 - DNA, 26 bp, Artificial Sequence
  Probe
agtctcataatctgaaggtcgtgagt

SEQ ID NO: 38419 - DNA, 43 bp, Artificial Sequence; identical to SEQ ID NO: 3569
  Probe

SEQ ID NO: 38420 - DNA, 29 bp, Artificial Sequence
  Probe
agtggaaccacggcgtgattcataccttt

SEQ ID NO: 38421 - DNA, 37 bp, Artificial Sequence
  Probe
agtggctcgccgtgatcgtatagtggttagtactctg

SEQ ID NO: 38422 - DNA, 36 bp, Artificial Sequence; identical to SEQ ID NO: 16927
  Probe

SEQ ID NO: 38423 - DNA, 18 bp, Artificial Sequence
  Probe
agtggtagaattctcgcc

SEQ ID NO: 38424 - DNA, 20 bp, Artificial Sequence
  Probe
agtggtagaattctcgcctc

SEQ ID NO: 38425 - DNA, 20 bp, Artificial Sequence
  Probe
agtggtagaattctcgcctg

SEQ ID NO: 38426 - DNA, 20 bp, Artificial Sequence
  Probe
agtggtagagcatttgactg

SEQ ID NO: 38427 - DNA, 25 bp, Artificial Sequence
  Probe
agtggtagagcatttgactgcagat

SEQ ID NO: 38428 - DNA, 35 bp, Artificial Sequence
  Probe
agtggtagagcgcatgctttgcatgtatgaggcct

SEQ ID NO: 38429 - DNA, 36 bp, Artificial Sequence; identical to SEQ ID NO: 16938
  Probe

SEQ ID NO: 38430 - DNA, 18 bp, Artificial Sequence
  Probe
agtggtcatcacgttcgc

SEQ ID NO: 38431 - DNA, 21 bp, Artificial Sequence
  Probe
agtggtctaaggcgccagact

SEQ ID NO: 38432 - DNA, 23 bp, Artificial Sequence
  Probe
agtggtctagtggttaggattca

SEQ ID NO: 38433 - DNA, 17 bp, Artificial Sequence
  Probe
agtggtgagtatccccg

SEQ ID NO: 38434 - DNA, 18 bp, Artificial Sequence
  Probe
agtggtgagtatccccgc

SEQ ID NO: 38435 - DNA, 24 bp, Artificial Sequence
  Probe
agtggtgagtatccccgcctgtca

SEQ ID NO: 38436 - DNA, 35 bp, Artificial Sequence; identical to SEQ ID NO: 16948
  Probe

SEQ ID NO: 38437 - DNA, 36 bp, Artificial Sequence; identical to SEQ ID NO: 12765
  Probe

SEQ ID NO: 38438 - DNA, 37 bp, Artificial Sequence; identical to SEQ ID NO: 12766
  Probe

SEQ ID NO: 38439 - DNA, 17 bp, Artificial Sequence
  Probe
agtggttacccttctta

SEQ ID NO: 38440 - DNA, 22 bp, Artificial Sequence
  Probe
agtggttacccttcttacgtct

SEQ ID NO: 38441 - DNA, 23 bp, Artificial Sequence
  Probe
agtggttacccttcttacgtctt

SEQ ID NO: 38442 - DNA, 33 bp, Artificial Sequence; identical to SEQ ID NO: 16958
  Probe

SEQ ID NO: 38443 - DNA, 18 bp, Artificial Sequence
  Probe
agtggttagtactctgcg

SEQ ID NO: 38444 - DNA, 18 bp, Artificial Sequence
  Probe
agtggttatcacgttcgc

SEQ ID NO: 38445 - DNA, 41 bp, Artificial Sequence; identical to SEQ ID NO: 16968
  Probe

SEQ ID NO: 38446 - DNA, 21 bp, Artificial Sequence
  Probe
agtgtagtggttatcacgtct

SEQ ID NO: 38447 - DNA, 21 bp, Artificial Sequence
  Probe
agtgtagtggttatcacgttc

SEQ ID NO: 38448 - DNA, 23 bp, Artificial Sequence
  Probe
agtgtagtggttatcacgttcgc

SEQ ID NO: 38449 - DNA, 18 bp, Artificial Sequence
  Probe
agtgtgtcaggatggccg

SEQ ID NO: 38450 - DNA, 34 bp, Artificial Sequence; identical to SEQ ID NO: 3601
  Probe

SEQ ID NO: 38451 - DNA, 41 bp, Artificial Sequence; identical to SEQ ID NO: 3608
  Probe

SEQ ID NO: 38452 - DNA, 50 bp, Artificial Sequence
  Probe
agttaccagaatggccgagtggttaaggcgttggacttaagatccaatgg

SEQ ID NO: 38453 - DNA, 20 bp, Artificial Sequence
  Probe
agttcaaatctcggtggaac

SEQ ID NO: 38454 - DNA, 31 bp, Artificial Sequence
  Probe
agttcaattctcgctggggcctgtgtgtttt

SEQ ID NO: 38455 - DNA, 21 bp, Artificial Sequence
  Probe
agttcgaacctcagagggggc

SEQ ID NO: 38456 - DNA, 22 bp, Artificial Sequence
  Probe
agttcgaacctcagagggggca

SEQ ID NO: 38457 - DNA, 34 bp, Artificial Sequence
  Probe
agttcgaacctcagagggggcaaggcgtctgttt

SEQ ID NO: 38458 - DNA, 31 bp, Artificial Sequence
  Probe
agttcgaacctcagagggggcagctgccatt

SEQ ID NO: 38459 - DNA, 32 bp, Artificial Sequence
  Probe
agttcgaacctcagagggggcagctgccattt

SEQ ID NO: 38460 - DNA, 33 bp, Artificial Sequence
  Probe
agttcgaacctcagagggggcagctgccatttt

SEQ ID NO: 38461 - DNA, 33 bp, Artificial Sequence
  Probe
agttcgagcctcacacggggcagtctaacgttt

SEQ ID NO: 38462 - DNA, 31 bp, Artificial Sequence
  Probe
agttcgagcctcacctggagcaagacccttt

SEQ ID NO: 38463 - DNA, 30 bp, Artificial Sequence
  Probe
agttcgatcctcacacggggcacaataatt

SEQ ID NO: 38464 - DNA, 31 bp, Artificial Sequence
  Probe
agttcgatcctcacacggggcacaataattt

SEQ ID NO: 38465 - DNA, 32 bp, Artificial Sequence
  Probe
agttcgatcctcacacggggcacaataatttt

SEQ ID NO: 38466 - DNA, 35 bp, Artificial Sequence; identical to SEQ ID NO: 3616
  Probe

SEQ ID NO: 38467 - DNA, 18 bp, Artificial Sequence
  Probe
agttggtagagcatcaga

SEQ ID NO: 38468 - DNA, 21 bp, Artificial Sequence
  Probe
agttggtagagcggaggactg

SEQ ID NO: 38469 - DNA, 18 bp, Artificial Sequence
  Probe
agttggttaaagcgcctg

SEQ ID NO: 38470 - DNA, 36 bp, Artificial Sequence
  Probe
agttggttagagcgtgctgctactaatgccagggtc

SEQ ID NO: 38471 - DNA, 37 bp, Artificial Sequence
  Probe
agttggttagagcgtgctgctactaatgccagggtcg

SEQ ID NO: 38472 - DNA, 31 bp, Artificial Sequence; identical to SEQ ID NO: 17021
  Probe

SEQ ID NO: 38473 - DNA, 24 bp, Artificial Sequence
  Probe
agtttttctggtggattacgcacc

SEQ ID NO: 38474 - DNA, 50 bp, Artificial Sequence; identical to SEQ ID NO: 3624
  Probe

SEQ ID NO: 38475 - DNA, 30 bp, Artificial Sequence; identical to SEQ ID NO: 3625
  Probe

SEQ ID NO: 38476 - DNA, 29 bp, Artificial Sequence
  Probe
ataaccatgcacactactataaccaccct

SEQ ID NO: 38477 - DNA, 30 bp, Artificial Sequence; identical to SEQ ID NO: 3631
  Probe

SEQ ID NO: 38478 - DNA, 18 bp, Artificial Sequence
  Probe
ataacccagaggtcgatg

SEQ ID NO: 38479 - DNA, 19 bp, Artificial Sequence
  Probe
ataacccagaggtcgatgg

SEQ ID NO: 38480 - DNA, 42 bp, Artificial Sequence; identical to SEQ ID NO: 3634
  Probe

SEQ ID NO: 38481 - DNA, 33 bp, Artificial Sequence; identical to SEQ ID NO: 17058
  Probe

SEQ ID NO: 38482 - DNA, 36 bp, Artificial Sequence; identical to SEQ ID NO: 17060
  Probe

SEQ ID NO: 38483 - DNA, 34 bp, Artificial Sequence; identical to SEQ ID NO: 3647
  Probe

SEQ ID NO: 38484 - DNA, 50 bp, Artificial Sequence; identical to SEQ ID NO: 3652
  Probe

SEQ ID NO: 38485 - DNA, 20 bp, Artificial Sequence
  Probe
ataatcatatttaccaaatg

SEQ ID NO: 38486 - DNA, 17 bp, Artificial Sequence
  Probe
ataatctgaaggtcctg

SEQ ID NO: 38487 - DNA, 18 bp, Artificial Sequence
  Probe
ataatctgaaggtcctga

SEQ ID NO: 38488 - DNA, 20 bp, Artificial Sequence
  Probe
ataatctgaaggtcctgagt

SEQ ID NO: 38489 - DNA, 18 bp, Artificial Sequence
  Probe
ataatctgaaggtcgtga

SEQ ID NO: 38490 - DNA, 20 bp, Artificial Sequence
  Probe
ataatctgaaggtcgtgagt

SEQ ID NO: 38491 - DNA, 38 bp, Artificial Sequence
  Probe
ataatctgaaggtcgtgagttcgagcctcacacggggc

SEQ ID NO: 38492 - DNA, 31 bp, Artificial Sequence; identical to SEQ ID NO: 17084
  Probe

SEQ ID NO: 38493 - DNA, 50 bp, Artificial Sequence; identical to SEQ ID NO: 28366
  Probe

SEQ ID NO: 38494 - DNA, 46 bp, Artificial Sequence; identical to SEQ ID NO: 3655
  Probe

SEQ ID NO: 38495 - DNA, 50 bp, Artificial Sequence; identical to SEQ ID NO: 3657
  Probe

SEQ ID NO: 38496 - DNA, 33 bp, Artificial Sequence; identical to SEQ ID NO: 3663
  Probe

SEQ ID NO: 38497 - DNA, 41 bp, Artificial Sequence; identical to SEQ ID NO: 3670
  Probe

SEQ ID NO: 38498 - DNA, 42 bp, Artificial Sequence; identical to SEQ ID NO: 3671
  Probe

SEQ ID NO: 38499 - DNA, 43 bp, Artificial Sequence; identical to SEQ ID NO: 28403
  Probe

SEQ ID NO: 38500 - DNA, 18 bp, Artificial Sequence
  Probe
atagctcaggggttagag

SEQ ID NO: 38501 - DNA, 18 bp, Artificial Sequence
  Probe
atagctcagtcggtagag

SEQ ID NO: 38502 - DNA, 20 bp, Artificial Sequence
  Probe
atagctcagtcggtagagca

SEQ ID NO: 38503 - DNA, 22 bp, Artificial Sequence
  Probe
atagctcagtcggtagagcatc

SEQ ID NO: 38504 - DNA, 30 bp, Artificial Sequence; identical to SEQ ID NO: 12797
  Probe

SEQ ID NO: 38505 - DNA, 31 bp, Artificial Sequence; identical to SEQ ID NO: 12798
  Probe

SEQ ID NO: 38506 - DNA, 50 bp, Artificial Sequence
  Probe
atagctcagtcggtagagcatcagacttttaatctgagggtccagggttc

SEQ ID NO: 38507 - DNA, 17 bp, Artificial Sequence
  Probe
atagctcagttgggaga

SEQ ID NO: 38508 - DNA, 18 bp, Artificial Sequence
  Probe
atagctcagttgggagag

SEQ ID NO: 38509 - DNA, 17 bp, Artificial Sequence
  Probe
ataggtattaaggtttt

SEQ ID NO: 38510 - DNA, 18 bp, Artificial Sequence
  Probe
ataggtttggtcctagcc

SEQ ID NO: 38511 - DNA, 23 bp, Artificial Sequence
  Probe
ataggtttggtcctagcctttct

SEQ ID NO: 38512 - DNA, 29 bp, Artificial Sequence
  Probe
ataggtttggtcctagcctttctattagc

SEQ ID NO: 38513 - DNA, 18 bp, Artificial Sequence
  Probe
atagtggtaagcatagct

SEQ ID NO: 38514 - DNA, 19 bp, Artificial Sequence
  Probe
atagtggtaagcatagctg

SEQ ID NO: 38515 - DNA, 19 bp, Artificial Sequence
  Probe
atagtggtgagcatagctg

SEQ ID NO: 38516 - DNA, 18 bp, Artificial Sequence
  Probe
atagtggtgagtatcccc

SEQ ID NO: 38517 - DNA, 18 bp, Artificial Sequence
  Probe
atagtggttagcatagct

SEQ ID NO: 38518 - DNA, 18 bp, Artificial Sequence
  Probe
atagtggttagtactctg

SEQ ID NO: 38519 - DNA, 23 bp, Artificial Sequence
  Probe
atagtgtagtggttatcacgtct

SEQ ID NO: 38520 - DNA, 30 bp, Artificial Sequence; identical to SEQ ID NO: 3694
  Probe

SEQ ID NO: 38521 - DNA, 32 bp, Artificial Sequence; identical to SEQ ID NO: 17140
  Probe

SEQ ID NO: 38522 - DNA, 34 bp, Artificial Sequence; identical to SEQ ID NO: 12800
  Probe

SEQ ID NO: 38523 - DNA, 36 bp, Artificial Sequence; identical to SEQ ID NO: 372
  Probe

SEQ ID NO: 38524 - DNA, 39 bp, Artificial Sequence; identical to SEQ ID NO: 3695
  Probe

SEQ ID NO: 38525 - DNA, 29 bp, Artificial Sequence
  Probe
atatccaaccttcagctatagggtggaga

SEQ ID NO: 38526 - DNA, 25 bp, Artificial Sequence
  Probe
atatggtctagcggttaggattcct

SEQ ID NO: 38527 - DNA, 32 bp, Artificial Sequence
  Probe
atatgtccgcgtgggttcgaaccccactcctg

SEQ ID NO: 38528 - DNA, 50 bp, Artificial Sequence; identical to SEQ ID NO: 3698
  Probe

SEQ ID NO: 38529 - DNA, 39 bp, Artificial Sequence; identical to SEQ ID NO: 17152
  Probe

SEQ ID NO: 38530 - DNA, 39 bp, Artificial Sequence; identical to SEQ ID NO: 3707
  Probe

SEQ ID NO: 38531 - DNA, 18 bp, Artificial Sequence
  Probe
atcagaagattgagggtt

SEQ ID NO: 38532 - DNA, 34 bp, Artificial Sequence; identical to SEQ ID NO: 12806
  Probe

SEQ ID NO: 38533 - DNA, 35 bp, Artificial Sequence
  Probe
atcagaagattgagggttcgagtcccttcgtggtc

SEQ ID NO: 38534 - DNA, 35 bp, Artificial Sequence
  Probe
atcagaaggttgcgtgttcaagtcacgtcggggtc

SEQ ID NO: 38535 - DNA, 30 bp, Artificial Sequence; identical to SEQ ID NO: 8552
  Probe

SEQ ID NO: 38536 - DNA, 27 bp, Artificial Sequence
  Probe
atccaaccttcagctatagggtggaga

SEQ ID NO: 38537 - DNA, 21 bp, Artificial Sequence
  Probe
atccaatggggtctccccgcg

SEQ ID NO: 38538 - DNA, 24 bp, Artificial Sequence
  Probe
atccaatggggtctccccgcgcag

SEQ ID NO: 38539 - DNA, 26 bp, Artificial Sequence
  Probe
atccaatggggtctccccgcgcaggt

SEQ ID NO: 38540 - DNA, 26 bp, Artificial Sequence
  Probe
atccaatggggtttccccgcacaggt

SEQ ID NO: 38541 - DNA, 18 bp, Artificial Sequence
  Probe
atccagcgatccgagttc

SEQ ID NO: 38542 - DNA, 34 bp, Artificial Sequence; identical to SEQ ID NO: 17194
  Probe

SEQ ID NO: 38543 - DNA, 33 bp, Artificial Sequence
  Probe
atccagcgatccgagttcaaatctcggtgggac

SEQ ID NO: 38544 - DNA, 34 bp, Artificial Sequence; identical to SEQ ID NO: 17199
  Probe

SEQ ID NO: 38545 - DNA, 35 bp, Artificial Sequence; identical to SEQ ID NO: 380
  Probe

SEQ ID NO: 38546 - DNA, 38 bp, Artificial Sequence; identical to SEQ ID NO: 3724
  Probe

SEQ ID NO: 38547 - DNA, 33 bp, Artificial Sequence
  Probe
atccagcgatccgagttcaagtctcggtggaac

SEQ ID NO: 38548 - DNA, 34 bp, Artificial Sequence
  Probe
atccagcgatccgagttcaagtctcggtggaacc

SEQ ID NO: 38549 - DNA, 38 bp, Artificial Sequence; identical to SEQ ID NO: 17204
  Probe

SEQ ID NO: 38550 - DNA, 18 bp, Artificial Sequence
  Probe
atccaggtgccccctccc

SEQ ID NO: 38551 - DNA, 23 bp, Artificial Sequence
  Probe
atccattggggtctccccgcgca

SEQ ID NO: 38552 - DNA, 24 bp, Artificial Sequence
  Probe
atccattggggtctccccgcgcag

SEQ ID NO: 38553 - DNA, 26 bp, Artificial Sequence
  Probe
atccattggggtctccccgcgcaggt

SEQ ID NO: 38554 - DNA, 25 bp, Artificial Sequence
  Probe
atccattggggtttccccgcgcagg

SEQ ID NO: 38555 - DNA, 26 bp, Artificial Sequence
  Probe
atccattggggtttccccgcgcaggt

SEQ ID NO: 38556 - DNA, 50 bp, Artificial Sequence; identical to SEQ ID NO: 28512
  Probe

SEQ ID NO: 38557 - DNA, 18 bp, Artificial Sequence
  Probe
atcccaccgctgccacac

SEQ ID NO: 38558 - DNA, 23 bp, Artificial Sequence
  Probe
atcccacttctgacacatacttt

SEQ ID NO: 38559 - DNA, 18 bp, Artificial Sequence
  Probe
atcccagcggtgcctccg

SEQ ID NO: 38560 - DNA, 50 bp, Artificial Sequence; identical to SEQ ID NO: 3740
  Probe

SEQ ID NO: 38561 - DNA, 50 bp, Artificial Sequence
  Probe
atccccgcctgtcacgcgggagaccggggttcgattccccgacggggagg

SEQ ID NO: 38562 - DNA, 18 bp, Artificial Sequence
  Probe
atcccggacgagccccct

SEQ ID NO: 38563 - DNA, 50 bp, Artificial Sequence
  Probe
atccggccggttagctcagttggttagagcgtggtgctaataacgccaag

SEQ ID NO: 38564 - DNA, 18 bp, Artificial Sequence
  Probe
atccggctcgaaggacga

SEQ ID NO: 38565 - DNA, 18 bp, Artificial Sequence
  Probe
atccgggtgccccctcaa

SEQ ID NO: 38566 - DNA, 18 bp, Artificial Sequence
  Probe
atccgggtgccccctctg

SEQ ID NO: 38567 - DNA, 18 bp, Artificial Sequence
  Probe
atcctaaaatgttttcag

SEQ ID NO: 38568 - DNA, 31 bp, Artificial Sequence
  Probe
atcctgggttcgactcccagcggggccttgg

SEQ ID NO: 38569 - DNA, 34 bp, Artificial Sequence
  Probe
atccttaggtcgctggttcgaatccggctcgaag

SEQ ID NO: 38570 - DNA, 35 bp, Artificial Sequence
  Probe
atccttaggtcgctggttcgaatccggctcggagg

SEQ ID NO: 38571 - DNA, 34 bp, Artificial Sequence; identical to SEQ ID NO: 17307
  Probe

SEQ ID NO: 38572 - DNA, 49 bp, Artificial Sequence
  Probe
atccttaggtcgctggttcgattccggctcgaaggaagtgcccgatgct

SEQ ID NO: 38573 - DNA, 50 bp, Artificial Sequence; identical to SEQ ID NO: 17308
  Probe

SEQ ID NO: 38574 - DNA, 50 bp, Artificial Sequence; identical to SEQ ID NO: 3753
  Probe

SEQ ID NO: 38575 - DNA, 50 bp, Artificial Sequence
  Probe
atccttaggtcgctggttcgattccggctcgaaggagacaagtgcggttt

SEQ ID NO: 38576 - DNA, 50 bp, Artificial Sequence
  Probe
atccttaggtcgctggttcgattccggctcgaaggagacgctgctgtttt

SEQ ID NO: 38577 - DNA, 50 bp, Artificial Sequence
  Probe
atccttaggtcgctggttcgattccggctcgaaggagctgccgtattctt

SEQ ID NO: 38578 - DNA, 32 bp, Artificial Sequence
  Probe
atcgaaaccatcctctgctaggtgcctgtttt

SEQ ID NO: 38579 - DNA, 30 bp, Artificial Sequence
  Probe
atcgaaaccatcctctgctatcggagtttt

SEQ ID NO: 38580 - DNA, 31 bp, Artificial Sequence
  Probe
atcgaaaccatcctctgctatcggagttttt

SEQ ID NO: 38581 - DNA, 32 bp, Artificial Sequence
  Probe
atcgaaaccatcctctgctatcggagtttttt

SEQ ID NO: 38582 - DNA, 20 bp, Artificial Sequence
  Probe
atcgatgcccgcatcctcca

SEQ ID NO: 38583 - DNA, 29 bp, Artificial Sequence
  Probe
atcgatgcccgcatcctccactcagcttt

SEQ ID NO: 38584 - DNA, 24 bp, Artificial Sequence
  Probe
atcgatgcccgcatcctccagttt

SEQ ID NO: 38585 - DNA, 24 bp, Artificial Sequence
  Probe
atcgatgcccgcattctccagttt

SEQ ID NO: 38586 - DNA, 50 bp, Artificial Sequence; identical to SEQ ID NO: 3759
  Probe

SEQ ID NO: 38587 - DNA, 35 bp, Artificial Sequence; identical to SEQ ID NO: 17338
  Probe

SEQ ID NO: 38588 - DNA, 36 bp, Artificial Sequence; identical to SEQ ID NO: 17339
  Probe

SEQ ID NO: 38589 - DNA, 38 bp, Artificial Sequence; identical to SEQ ID NO: 17341
  Probe

SEQ ID NO: 38590 - DNA, 39 bp, Artificial Sequence; identical to SEQ ID NO: 28682
  Probe

SEQ ID NO: 38591 - DNA, 50 bp, Artificial Sequence
  Probe
atcggtgcatgggtggttcagtggtagaattctcgcctgccacgcgggag

SEQ ID NO: 38592 - DNA, 20 bp, Artificial Sequence
  Probe
atcggttagcgcgcggtact

SEQ ID NO: 38593 - DNA, 18 bp, Artificial Sequence
  Probe
atcgtatagtggttagta

SEQ ID NO: 38594 - DNA, 19 bp, Artificial Sequence
  Probe
atcgtatagtggttagtac

SEQ ID NO: 38595 - DNA, 20 bp, Artificial Sequence
  Probe
atcgtatagtggttagtact

SEQ ID NO: 38596 - DNA, 21 bp, Artificial Sequence
  Probe
atcgtatagtggttagtactc

SEQ ID NO: 38597 - DNA, 22 bp, Artificial Sequence
  Probe
atcgtatagtggttagtactct

SEQ ID NO: 38598 - DNA, 23 bp, Artificial Sequence
  Probe
atcgtatagtggttagtactctg

SEQ ID NO: 38599 - DNA, 24 bp, Artificial Sequence
  Probe
atcgtatagtggttagtactctgc

SEQ ID NO: 38600 - DNA, 35 bp, Artificial Sequence; identical to SEQ ID NO: 3765
  Probe

SEQ ID NO: 38601 - DNA, 36 bp, Artificial Sequence; identical to SEQ ID NO: 3766
  Probe

SEQ ID NO: 38602 - DNA, 38 bp, Artificial Sequence; identical to SEQ ID NO: 17349
  Probe

SEQ ID NO: 38603 - DNA, 18 bp, Artificial Sequence
  Probe
atctaaaggtccctggtt

SEQ ID NO: 38604 - DNA, 34 bp, Artificial Sequence
  Probe
atctaaaggtccctggttcaatcccgggtttcgg

SEQ ID NO: 38605 - DNA, 33 bp, Artificial Sequence; identical to SEQ ID NO: 3772
  Probe

SEQ ID NO: 38606 - DNA, 36 bp, Artificial Sequence; identical to SEQ ID NO: 393
  Probe

SEQ ID NO: 38607 - DNA, 39 bp, Artificial Sequence; identical to SEQ ID NO: 3774
  Probe

SEQ ID NO: 38608 - DNA, 17 bp, Artificial Sequence
  Probe
atctgaaggtcctgagt

SEQ ID NO: 38609 - DNA, 20 bp, Artificial Sequence
  Probe
atctgaaggtcctgagttcg

SEQ ID NO: 38610 - DNA, 34 bp, Artificial Sequence
  Probe
atctgaaggtcgtgagttcgagcctcacacgggg

SEQ ID NO: 38611 - DNA, 35 bp, Artificial Sequence
  Probe
atctgaaggtcgtgagttcgagcctcacacggggc

SEQ ID NO: 38612 - DNA, 36 bp, Artificial Sequence; identical to SEQ ID NO: 28719
  Probe

SEQ ID NO: 38613 - DNA, 36 bp, Artificial Sequence; identical to SEQ ID NO: 17365
  Probe

SEQ ID NO: 38614 - DNA, 39 bp, Artificial Sequence; identical to SEQ ID NO: 3783
  Probe

SEQ ID NO: 38615 - DNA, 45 bp, Artificial Sequence; identical to SEQ ID NO: 3784
  Probe

SEQ ID NO: 38616 - DNA, 38 bp, Artificial Sequence; identical to SEQ ID NO: 3792
  Probe

SEQ ID NO: 38617 - DNA, 36 bp, Artificial Sequence; identical to SEQ ID NO: 25049
  Probe

SEQ ID NO: 38618 - DNA, 39 bp, Artificial Sequence; identical to SEQ ID NO: 3794
  Probe

SEQ ID NO: 38619 - DNA, 50 bp, Artificial Sequence; identical to SEQ ID NO: 3797
  Probe

SEQ ID NO: 38620 - DNA, 26 bp, Artificial Sequence
  Probe
atgaaaacctttttccaaggacaaat

SEQ ID NO: 38621 - DNA, 30 bp, Artificial Sequence; identical to SEQ ID NO: 17384
  Probe

SEQ ID NO: 38622 - DNA, 30 bp, Artificial Sequence; identical to SEQ ID NO: 17385
  Probe

SEQ ID NO: 38623 - DNA, 31 bp, Artificial Sequence; identical to SEQ ID NO: 3801
  Probe

SEQ ID NO: 38624 - DNA, 30 bp, Artificial Sequence; identical to SEQ ID NO: 17387
  Probe

SEQ ID NO: 38625 - DNA, 31 bp, Artificial Sequence; identical to SEQ ID NO: 3802
  Probe

SEQ ID NO: 38626 - DNA, 31 bp, Artificial Sequence; identical to SEQ ID NO: 3804
  Probe

SEQ ID NO: 38627 - DNA, 30 bp, Artificial Sequence; identical to SEQ ID NO: 3807
  Probe

SEQ ID NO: 38628 - DNA, 24 bp, Artificial Sequence
  Probe
atgccccaactaaatactaccgta

SEQ ID NO: 38629 - DNA, 28 bp, Artificial Sequence
  Probe
atgccccaactaaatactaccgtatggc

SEQ ID NO: 38630 - DNA, 29 bp, Artificial Sequence
  Probe
atgcccccatgtctaacaacatggctttc

SEQ ID NO: 38631 - DNA, 30 bp, Artificial Sequence; identical to SEQ ID NO: 3818
  Probe

SEQ ID NO: 38632 - DNA, 31 bp, Artificial Sequence; identical to SEQ ID NO: 3819
  Probe

SEQ ID NO: 38633 - DNA, 32 bp, Artificial Sequence; identical to SEQ ID NO: 3820
  Probe

SEQ ID NO: 38634 - DNA, 33 bp, Artificial Sequence; identical to SEQ ID NO: 3821
  Probe

SEQ ID NO: 38635 - DNA, 34 bp, Artificial Sequence; identical to SEQ ID NO: 3822
  Probe

SEQ ID NO: 38636 - DNA, 35 bp, Artificial Sequence; identical to SEQ ID NO: 3823
  Probe

SEQ ID NO: 38637 - DNA, 30 bp, Artificial Sequence; identical to SEQ ID NO: 3825
  Probe

SEQ ID NO: 38638 - DNA, 34 bp, Artificial Sequence; identical to SEQ ID NO: 17434
  Probe

SEQ ID NO: 38639 - DNA, 27 bp, Artificial Sequence
  Probe
atggcacatgcagcgcaagtaggtcta

SEQ ID NO: 38640 - DNA, 29 bp, Artificial Sequence
  Probe
atggcacatgcagcgcaagtaggtctaca

SEQ ID NO: 38641 - DNA, 30 bp, Artificial Sequence; identical to SEQ ID NO: 3841
  Probe

SEQ ID NO: 38642 - DNA, 43 bp, Artificial Sequence; identical to SEQ ID NO: 28839
  Probe

SEQ ID NO: 38643 - DNA, 50 bp, Artificial Sequence; identical to SEQ ID NO: 28840
  Probe

SEQ ID NO: 38644 - DNA, 21 bp, Artificial Sequence
  Probe
atggtctagcggttaggattc

SEQ ID NO: 38645 - DNA, 20 bp, Artificial Sequence
  Probe
atggttagcactctggactc

SEQ ID NO: 38646 - DNA, 34 bp, Artificial Sequence
  Probe
atggttagcactctggactctgaatccagcgatc

SEQ ID NO: 38647 - DNA, 36 bp, Artificial Sequence; identical to SEQ ID NO: 17470
  Probe

SEQ ID NO: 38648 - DNA, 50 bp, Artificial Sequence
  Probe
atggttagcactctggactctgaatccagcgatccgagttcaagtctcgg

SEQ ID NO: 38649 - DNA, 36 bp, Artificial Sequence; identical to SEQ ID NO: 28906
  Probe

SEQ ID NO: 38650 - DNA, 18 bp, Artificial Sequence
  Probe
atgtatatatcctcttcc

SEQ ID NO: 38651 - DNA, 30 bp, Artificial Sequence; identical to SEQ ID NO: 9409
  Probe

SEQ ID NO: 38652 - DNA, 18 bp, Artificial Sequence
  Probe
atgtggtggcttactttt

SEQ ID NO: 38653 - DNA, 35 bp, Artificial Sequence; identical to SEQ ID NO: 3866
  Probe

SEQ ID NO: 38654 - DNA, 36 bp, Artificial Sequence; identical to SEQ ID NO: 3867
  Probe

SEQ ID NO: 38655 - DNA, 37 bp, Artificial Sequence; identical to SEQ ID NO: 3868
  Probe

SEQ ID NO: 38656 - DNA, 38 bp, Artificial Sequence; identical to SEQ ID NO: 3869
  Probe

SEQ ID NO: 38657 - DNA, 33 bp, Artificial Sequence; identical to SEQ ID NO: 3873
  Probe

SEQ ID NO: 38658 - DNA, 27 bp, Artificial Sequence
  Probe
attaaggctccagtctcttcgggggcg

SEQ ID NO: 38659 - DNA, 29 bp, Artificial Sequence
  Probe
attaaggctccagtctcttcgggggcgtg

SEQ ID NO: 38660 - DNA, 30 bp, Artificial Sequence; identical to SEQ ID NO: 3877
  Probe

SEQ ID NO: 38661 - DNA, 50 bp, Artificial Sequence; identical to SEQ ID NO: 420
  Probe

SEQ ID NO: 38662 - DNA, 50 bp, Artificial Sequence; identical to SEQ ID NO: 421
  Probe

SEQ ID NO: 38663 - DNA, 36 bp, Artificial Sequence; identical to SEQ ID NO: 17518
  Probe

SEQ ID NO: 38664 - DNA, 45 bp, Artificial Sequence; identical to SEQ ID NO: 28985
  Probe

SEQ ID NO: 38665 - DNA, 46 bp, Artificial Sequence; identical to SEQ ID NO: 28986
  Probe

SEQ ID NO: 38666 - DNA, 22 bp, Artificial Sequence
  Probe
attcccattcttgcgacccggg

SEQ ID NO: 38667 - DNA, 32 bp, Artificial Sequence
  Probe
attcccattcttgcgacccgggttcgattccc

SEQ ID NO: 38668 - DNA, 37 bp, Artificial Sequence
  Probe
attcccattcttgcgacccgggttcgattcccgggcg

SEQ ID NO: 38669 - DNA, 38 bp, Artificial Sequence
  Probe
attcccattcttgcgacccgggttcgattcccgggcgg

SEQ ID NO: 38670 - DNA, 42 bp, Artificial Sequence
  Probe
attcccattcttgcgacccgggttcgattcccgggcggcgca

SEQ ID NO: 38671 - DNA, 45 bp, Artificial Sequence; identical to SEQ ID NO: 17522
  Probe

SEQ ID NO: 38672 - DNA, 49 bp, Artificial Sequence
  Probe
attcccattcttgcgacccgggttcgattcccgggcggcgcacttagtt

SEQ ID NO: 38673 - DNA, 50 bp, Artificial Sequence
  Probe
attcccattcttgcgacccgggttcgattcccgggcggcgcacttagttt

SEQ ID NO: 38674 - DNA, 45 bp, Artificial Sequence
  Probe
attcccattcttgcgacccgggttcgattcccgggcggcgcatag

SEQ ID NO: 38675 - DNA, 46 bp, Artificial Sequence
  Probe
attcccattcttgcgacccgggttcgattcccgggcggcgcatagg

SEQ ID NO: 38676 - DNA, 50 bp, Artificial Sequence
  Probe
attcccattcttgcgacccgggttcgattcccgggcggcgcataggcgtt

SEQ ID NO: 38677 - DNA, 22 bp, Artificial Sequence
  Probe
attccggatcagaagattgagg

SEQ ID NO: 38678 - DNA, 50 bp, Artificial Sequence
  Probe
attccggatcagaagattgagggttcgagtcccttcgtggtcgtcgtttt

SEQ ID NO: 38679 - DNA, 46 bp, Artificial Sequence
  Probe
attccggatcagaagattgagggttcgagtcccttcgtggtcgttg

SEQ ID NO: 38680 - DNA, 50 bp, Artificial Sequence
  Probe
attccggatcagaagattgagggttcgagtcccttcgtggtcgttgccat

SEQ ID NO: 38681 - DNA, 31 bp, Artificial Sequence
  Probe
attccggctcgaaggaagtgcccgatgcttt

SEQ ID NO: 38682 - DNA, 39 bp, Artificial Sequence
  Probe
attcctggttttcacccaggcggcccgggttcgactccc

SEQ ID NO: 38683 - DNA, 44 bp, Artificial Sequence
  Probe
attcctggttttcacccaggcggcccgggttcgactcccggtgt

SEQ ID NO: 38684 - DNA, 45 bp, Artificial Sequence
  Probe
attcctggttttcacccaggcggcccgggttcgactcccggtgtg

SEQ ID NO: 38685 - DNA, 46 bp, Artificial Sequence
  Probe
attcctggttttcacccaggcggcccgggttcgactcccggtgtgg

SEQ ID NO: 38686 - DNA, 50 bp, Artificial Sequence; identical to SEQ ID NO: 3883
  Probe

SEQ ID NO: 38687 - DNA, 50 bp, Artificial Sequence
  Probe
attcctggttttcacccaggtggcccgggttcgactcccggtatgggaac

SEQ ID NO: 38688 - DNA, 37 bp, Artificial Sequence; identical to SEQ ID NO: 3888
  Probe

SEQ ID NO: 38689 - DNA, 50 bp, Artificial Sequence; identical to SEQ ID NO: 29019
  Probe

SEQ ID NO: 38690 - DNA, 50 bp, Artificial Sequence; identical to SEQ ID NO: 29020
  Probe

SEQ ID NO: 38691 - DNA, 50 bp, Artificial Sequence; identical to SEQ ID NO: 29021
  Probe

SEQ ID NO: 38692 - DNA, 31 bp, Artificial Sequence
  Probe
attctcaaactttaaatgggcaagaagccca

SEQ ID NO: 38693 - DNA, 33 bp, Artificial Sequence
  Probe
attctcaaactttaaatgggcaagaagcccagc

SEQ ID NO: 38694 - DNA, 38 bp, Artificial Sequence; identical to SEQ ID NO: 3893
  Probe

SEQ ID NO: 38695 - DNA, 34 bp, Artificial Sequence; identical to SEQ ID NO: 17542
  Probe

SEQ ID NO: 38696 - DNA, 38 bp, Artificial Sequence; identical to SEQ ID NO: 3895
  Probe

SEQ ID NO: 38697 - DNA, 39 bp, Artificial Sequence; identical to SEQ ID NO: 3896
  Probe

SEQ ID NO: 38698 - DNA, 50 bp, Artificial Sequence; identical to SEQ ID NO: 3900
  Probe

SEQ ID NO: 38699 - DNA, 36 bp, Artificial Sequence
  Probe
attgagggttcgagtcccttcgtggtcggaacgttt

SEQ ID NO: 38700 - DNA, 44 bp, Artificial Sequence; identical to SEQ ID NO: 3906
  Probe

SEQ ID NO: 38701 - DNA, 50 bp, Artificial Sequence
  Probe
attggactgtaaatctaaagacaggggttaggcctctttttaccagctcc

SEQ ID NO: 38702 - DNA, 25 bp, Artificial Sequence
  Probe
attggtcgtggttgtagtccgtgcg

SEQ ID NO: 38703 - DNA, 28 bp, Artificial Sequence
  Probe
attggtcgtggttgtagtccgtgcgaga

SEQ ID NO: 38704 - DNA, 34 bp, Artificial Sequence; identical to SEQ ID NO: 3911
  Probe

SEQ ID NO: 38705 - DNA, 26 bp, Artificial Sequence
  Probe
attggtggttcagtggtagaattctc

SEQ ID NO: 38706 - DNA, 27 bp, Artificial Sequence
  Probe
attggtggttcagtggtagaattctcg

SEQ ID NO: 38707 - DNA, 28 bp, Artificial Sequence
  Probe
attggtggttcagtggtagaattctcgc

SEQ ID NO: 38708 - DNA, 35 bp, Artificial Sequence; identical to SEQ ID NO: 3927
  Probe

SEQ ID NO: 38709 - DNA, 38 bp, Artificial Sequence
  Probe
attgtgaatctgacaacagaggcttacgaccccttatt

SEQ ID NO: 38710 - DNA, 45 bp, Artificial Sequence; identical to SEQ ID NO: 3932
  Probe

SEQ ID NO: 38711 - DNA, 50 bp, Artificial Sequence
  Probe
atttaggctccagtctcttcggaggcgtgggttcgaatcccaccgctgcc

SEQ ID NO: 38712 - DNA, 27 bp, Artificial Sequence
  Probe
atttaggctccagtctcttcgggggcg

SEQ ID NO: 38713 - DNA, 29 bp, Artificial Sequence
  Probe
atttcaacttaacttgaccgctctgagct

SEQ ID NO: 38714 - DNA, 29 bp, Artificial Sequence
  Probe
caaaacatcagattgtgaatctgacaaca

SEQ ID NO: 38715 - DNA, 45 bp, Artificial Sequence; identical to SEQ ID NO: 435
  Probe

SEQ ID NO: 38716 - DNA, 50 bp, Artificial Sequence; identical to SEQ ID NO: 3958
  Probe

SEQ ID NO: 38717 - DNA, 24 bp, Artificial Sequence
  Probe
caaactttaaatgggcaagaagcc

SEQ ID NO: 38718 - DNA, 25 bp, Artificial Sequence
  Probe
caaactttaaatgggcaagaagccc

SEQ ID NO: 38719 - DNA, 26 bp, Artificial Sequence
  Probe
caaactttaaatgggcaagaagccca

SEQ ID NO: 38720 - DNA, 27 bp, Artificial Sequence
  Probe
caaactttaaatgggcaagaagcccag

SEQ ID NO: 38721 - DNA, 28 bp, Artificial Sequence
  Probe
caaactttaaatgggcaagaagcccagc

SEQ ID NO: 38722 - DNA, 29 bp, Artificial Sequence
  Probe
caaactttaaatgggcaagaagcccagct

SEQ ID NO: 38723 - DNA, 30 bp, Artificial Sequence; identical to SEQ ID NO: 17613
  Probe

SEQ ID NO: 38724 - DNA, 31 bp, Artificial Sequence; identical to SEQ ID NO: 3960
  Probe

SEQ ID NO: 38725 - DNA, 32 bp, Artificial Sequence; identical to SEQ ID NO: 17615
  Probe

SEQ ID NO: 38726 - DNA, 33 bp, Artificial Sequence; identical to SEQ ID NO: 3961
  Probe

SEQ ID NO: 38727 - DNA, 50 bp, Artificial Sequence; identical to SEQ ID NO: 3965
  Probe

SEQ ID NO: 38728 - DNA, 23 bp, Artificial Sequence
  Probe
caaatcagccgacgtttgctttt

SEQ ID NO: 38729 - DNA, 32 bp, Artificial Sequence; identical to SEQ ID NO: 4003
  Probe

SEQ ID NO: 38730 - DNA, 27 bp, Artificial Sequence
  Probe
caaccgagcgtccaagctctttccatt

SEQ ID NO: 38731 - DNA, 28 bp, Artificial Sequence
  Probe
caaccgagcgtccaagctctttccattt

SEQ ID NO: 38732 - DNA, 29 bp, Artificial Sequence
  Probe
caaccgagcgtccaagctctttccatttt

SEQ ID NO: 38733 - DNA, 30 bp, Artificial Sequence; identical to SEQ ID NO: 17662
  Probe

SEQ ID NO: 38734 - DNA, 26 bp, Artificial Sequence
  Probe
caacctcggttcgaatccgagtcacg

SEQ ID NO: 38735 - DNA, 32 bp, Artificial Sequence; identical to SEQ ID NO: 4008
  Probe

SEQ ID NO: 38736 - DNA, 32 bp, Artificial Sequence; identical to SEQ ID NO: 4010
  Probe

SEQ ID NO: 38737 - DNA, 34 bp, Artificial Sequence
  Probe
caacgatggtttttcatatcattggtcgtggttg

SEQ ID NO: 38738 - DNA, 20 bp, Artificial Sequence
  Probe
caactatcttattctccttt

SEQ ID NO: 38739 - DNA, 21 bp, Artificial Sequence
  Probe
caacttaacttgaccgctctg

SEQ ID NO: 38740 - DNA, 25 bp, Artificial Sequence
  Probe
caacttaacttgaccgctctgagct

SEQ ID NO: 38741 - DNA, 45 bp, Artificial Sequence; identical to SEQ ID NO: 4031
  Probe

SEQ ID NO: 38742 - DNA, 46 bp, Artificial Sequence; identical to SEQ ID NO: 4032
  Probe

SEQ ID NO: 38743 - DNA, 50 bp, Artificial Sequence; identical to SEQ ID NO: 4034
  Probe

SEQ ID NO: 38744 - DNA, 19 bp, Artificial Sequence
  Probe
caagaactgctaactcatg

SEQ ID NO: 38745 - DNA, 45 bp, Artificial Sequence; identical to SEQ ID NO: 451
  Probe

SEQ ID NO: 38746 - DNA, 49 bp, Artificial Sequence; identical to SEQ ID NO: 4043
  Probe

SEQ ID NO: 38747 - DNA, 50 bp, Artificial Sequence; identical to SEQ ID NO: 4044
  Probe

SEQ ID NO: 38748 - DNA, 31 bp, Artificial Sequence
  Probe
caagacccttttggatgttcgcaaccccttt

SEQ ID NO: 38749 - DNA, 44 bp, Artificial Sequence
  Probe
caagcagttaacgcgggttcgattcccgggtaacgaaacgtttt

SEQ ID NO: 38750 - DNA, 31 bp, Artificial Sequence; identical to SEQ ID NO: 457
  Probe

SEQ ID NO: 38751 - DNA, 32 bp, Artificial Sequence
  Probe
caagcagttgacccgggttcgattcccggcca

SEQ ID NO: 38752 - DNA, 34 bp, Artificial Sequence
  Probe
caagcagttgacccgggttcgattcccggccaac

SEQ ID NO: 38753 - DNA, 35 bp, Artificial Sequence
  Probe
caagcagttgacccgggttcgattcccggccaacg

SEQ ID NO: 38754 - DNA, 32 bp, Artificial Sequence
  Probe
caagtgatggtttccctctggcagttctcaag

SEQ ID NO: 38755 - DNA, 25 bp, Artificial Sequence
  Probe
caagtggttacccttcttacgtctt

SEQ ID NO: 38756 - DNA, 32 bp, Artificial Sequence
  Probe
caagttgttttatcctatctgcccaatactat

SEQ ID NO: 38757 - DNA, 50 bp, Artificial Sequence; identical to SEQ ID NO: 4055
  Probe

SEQ ID NO: 38758 - DNA, 23 bp, Artificial Sequence
  Probe
caatccccaatacctccaggttt

SEQ ID NO: 38759 - DNA, 32 bp, Artificial Sequence; identical to SEQ ID NO: 17735
  Probe

SEQ ID NO: 38760 - DNA, 33 bp, Artificial Sequence; identical to SEQ ID NO: 17736
  Probe

SEQ ID NO: 38761 - DNA, 50 bp, Artificial Sequence
  Probe
caatgccgaggttgtgagttcgagcctcacctggagcaagacccttttgg

SEQ ID NO: 38762 - DNA, 29 bp, Artificial Sequence
  Probe
caatggaggcgtgggttcgaatcccactt

SEQ ID NO: 38763 - DNA, 32 bp, Artificial Sequence
  Probe
caatggaggcgtgggttcgaatcccacttctg

SEQ ID NO: 38764 - DNA, 33 bp, Artificial Sequence
  Probe
caatggaggcgtgggttcgaatcccacttctga

SEQ ID NO: 38765 - DNA, 34 bp, Artificial Sequence
  Probe
caatggaggcgtgggttcgaatcccacttctgac

SEQ ID NO: 38766 - DNA, 35 bp, Artificial Sequence
  Probe
caatggaggcgtgggttcgaatcccacttctgaca

SEQ ID NO: 38767 - DNA, 18 bp, Artificial Sequence
  Probe
caatggataacgcgtctg

SEQ ID NO: 38768 - DNA, 27 bp, Artificial Sequence
  Probe
caatggataacgcgtctgactacggat

SEQ ID NO: 38769 - DNA, 18 bp, Artificial Sequence
  Probe
caatggatagcgcattgg

SEQ ID NO: 38770 - DNA, 21 bp, Artificial Sequence
  Probe
caatggcacggcaaggggctc

SEQ ID NO: 38771 - DNA, 18 bp, Artificial Sequence
  Probe
caatggggtctccccgcg

SEQ ID NO: 38772 - DNA, 22 bp, Artificial Sequence
  Probe
caatggggtctccccgcgcagg

SEQ ID NO: 38773 - DNA, 23 bp, Artificial Sequence
  Probe
caatggggtctccccgcgcaggt

SEQ ID NO: 38774 - DNA, 23 bp, Artificial Sequence
  Probe
caatggggtttccccgcacaggt

SEQ ID NO: 38775 - DNA, 32 bp, Artificial Sequence
  Probe
caatgtcgttagtctaggctgtcagctcttcc

SEQ ID NO: 38776 - DNA, 39 bp, Artificial Sequence; identical to SEQ ID NO: 4061
  Probe

SEQ ID NO: 38777 - DNA, 21 bp, Artificial Sequence
  Probe
caattcccggtcagggaacca

SEQ ID NO: 38778 - DNA, 34 bp, Artificial Sequence; identical to SEQ ID NO: 4076
  Probe

SEQ ID NO: 38779 - DNA, 24 bp, Artificial Sequence
  Probe
cacacctcagaaggtctcactttt

SEQ ID NO: 38780 - DNA, 18 bp, Artificial Sequence
  Probe
cacacgcgaaaggtcccc

SEQ ID NO: 38781 - DNA, 20 bp, Artificial Sequence
  Probe
cacacggggcacaataattt

SEQ ID NO: 38782 - DNA, 17 bp, Artificial Sequence
  Probe
cacatcaccccataaac

SEQ ID NO: 38783 - DNA, 18 bp, Artificial Sequence
  Probe
cacatcaccccataaaca

SEQ ID NO: 38784 - DNA, 21 bp, Artificial Sequence
  Probe
cacatcaccccataaacaaat

SEQ ID NO: 38785 - DNA, 39 bp, Artificial Sequence
  Probe
cacatctggggcattggtggttcagtggtagaattctcg

SEQ ID NO: 38786 - DNA, 26 bp, Artificial Sequence
  Probe
cacatggtctagcggttaggattcct

SEQ ID NO: 38787 - DNA, 49 bp, Artificial Sequence; identical to SEQ ID NO: 4113
  Probe

SEQ ID NO: 38788 - DNA, 50 bp, Artificial Sequence; identical to SEQ ID NO: 4114
  Probe

SEQ ID NO: 38789 - DNA, 34 bp, Artificial Sequence
  Probe
cacccaggcggcccgggttcgactcccggtgtgg

SEQ ID NO: 38790 - DNA, 22 bp, Artificial Sequence
  Probe
cacctcagaaggtctcactttt

SEQ ID NO: 38791 - DNA, 19 bp, Artificial Sequence
  Probe
cacgcagaaggtcctgggt

SEQ ID NO: 38792 - DNA, 41 bp, Artificial Sequence; identical to SEQ ID NO: 4122
  Probe

SEQ ID NO: 38793 - DNA, 20 bp, Artificial Sequence
  Probe
cacgcgaaaggtccccggtt

SEQ ID NO: 38794 - DNA, 35 bp, Artificial Sequence
  Probe
cacgcgaaaggtccccggttcgaaaccgggcggaa

SEQ ID NO: 38795 - DNA, 17 bp, Artificial Sequence
  Probe
cacgcgggagacccggg

SEQ ID NO: 38796 - DNA, 35 bp, Artificial Sequence
  Probe
cacgcgggagacccgggttcaattcccggccaatg

SEQ ID NO: 38797 - DNA, 36 bp, Artificial Sequence; identical to SEQ ID NO: 29343
  Probe

SEQ ID NO: 38798 - DNA, 18 bp, Artificial Sequence
  Probe
cacgcgggagaccggggt

SEQ ID NO: 38799 - DNA, 36 bp, Artificial Sequence; identical to SEQ ID NO: 477
  Probe

SEQ ID NO: 38800 - DNA, 30 bp, Artificial Sequence
  Probe
cacgcgggagaccggggttcgattccccaa

SEQ ID NO: 38801 - DNA, 34 bp, Artificial Sequence
  Probe
cacgcgggagaccggggttcgattccccaacggg

SEQ ID NO: 38802 - DNA, 35 bp, Artificial Sequence
  Probe
cacgcgggagaccggggttcgattccccaacgggg

SEQ ID NO: 38803 - DNA, 37 bp, Artificial Sequence
  Probe
cacgcgggagaccggggttcgattccccaacggggag

SEQ ID NO: 38804 - DNA, 32 bp, Artificial Sequence; identical to SEQ ID NO: 481
  Probe

SEQ ID NO: 38805 - DNA, 33 bp, Artificial Sequence; identical to SEQ ID NO: 482
  Probe

SEQ ID NO: 38806 - DNA, 38 bp, Artificial Sequence; identical to SEQ ID NO: 4137
  Probe

SEQ ID NO: 38807 - DNA, 46 bp, Artificial Sequence; identical to SEQ ID NO: 4141
  Probe

SEQ ID NO: 38808 - DNA, 50 bp, Artificial Sequence; identical to SEQ ID NO: 4143
  Probe

SEQ ID NO: 38809 - DNA, 38 bp, Artificial Sequence; identical to SEQ ID NO: 4149
  Probe

SEQ ID NO: 38810 - DNA, 50 bp, Artificial Sequence; identical to SEQ ID NO: 4162
  Probe

SEQ ID NO: 38811 - DNA, 45 bp, Artificial Sequence
  Probe
cacgcgggagaccggggttcgattccccgacggggaggccgggta

SEQ ID NO: 38812 - DNA, 50 bp, Artificial Sequence; identical to SEQ ID NO: 4170
  Probe

SEQ ID NO: 38813 - DNA, 32 bp, Artificial Sequence
  Probe
cacgcgggaggcccgggttcgattcccggcca

SEQ ID NO: 38814 - DNA, 34 bp, Artificial Sequence
  Probe
cacgcgggaggcccgggttcgattcccggccaat

SEQ ID NO: 38815 - DNA, 35 bp, Artificial Sequence
  Probe
cacgcgggaggcccgggttcgattcccggccaatg

SEQ ID NO: 38816 - DNA, 36 bp, Artificial Sequence; identical to SEQ ID NO: 29355
  Probe

SEQ ID NO: 38817 - DNA, 34 bp, Artificial Sequence
  Probe
cacgcgggaggcccgggttcgattcccggcccat

SEQ ID NO: 38818 - DNA, 36 bp, Artificial Sequence; identical to SEQ ID NO: 29362
  Probe

SEQ ID NO: 38819 - DNA, 21 bp, Artificial Sequence
  Probe
cacggcgtgattcataccttt

SEQ ID NO: 38820 - DNA, 45 bp, Artificial Sequence
  Probe
cactgaaaatgtttagacgggctcacatcaccccataaacaaata

SEQ ID NO: 38821 - DNA, 30 bp, Artificial Sequence; identical to SEQ ID NO: 493
  Probe

SEQ ID NO: 38822 - DNA, 32 bp, Artificial Sequence; identical to SEQ ID NO: 495
  Probe

SEQ ID NO: 38823 - DNA, 50 bp, Artificial Sequence; identical to SEQ ID NO: 502
  Probe

SEQ ID NO: 38824 - DNA, 38 bp, Artificial Sequence; identical to SEQ ID NO: 4203
  Probe

SEQ ID NO: 38825 - DNA, 20 bp, Artificial Sequence
  Probe
cagaagattctaggttcgac

SEQ ID NO: 38826 - DNA, 37 bp, Artificial Sequence; identical to SEQ ID NO: 4222
  Probe

SEQ ID NO: 38827 - DNA, 30 bp, Artificial Sequence; identical to SEQ ID NO: 519
  Probe

SEQ ID NO: 38828 - DNA, 31 bp, Artificial Sequence; identical to SEQ ID NO: 520
  Probe

SEQ ID NO: 38829 - DNA, 34 bp, Artificial Sequence; identical to SEQ ID NO: 523
  Probe

SEQ ID NO: 38830 - DNA, 35 bp, Artificial Sequence; identical to SEQ ID NO: 4232
  Probe

SEQ ID NO: 38831 - DNA, 37 bp, Artificial Sequence; identical to SEQ ID NO: 4234
  Probe

SEQ ID NO: 38832 - DNA, 50 bp, Artificial Sequence; identical to SEQ ID NO: 4242
  Probe

SEQ ID NO: 38833 - DNA, 21 bp, Artificial Sequence
  Probe
cagagggggcagctgccattt

SEQ ID NO: 38834 - DNA, 26 bp, Artificial Sequence
  Probe
cagagtgtagcttaacacaaagcacc

SEQ ID NO: 38835 - DNA, 27 bp, Artificial Sequence
  Probe
cagagtgtagcttaacacaaagcaccc

SEQ ID NO: 38836 - DNA, 28 bp, Artificial Sequence
  Probe
cagagtgtagcttaacacaaagcaccca

SEQ ID NO: 38837 - DNA, 29 bp, Artificial Sequence
  Probe
cagagtgtagcttaacacaaagcacccaa

SEQ ID NO: 38838 - DNA, 30 bp, Artificial Sequence; identical to SEQ ID NO: 4262
  Probe

SEQ ID NO: 38839 - DNA, 31 bp, Artificial Sequence; identical to SEQ ID NO: 4263
  Probe

SEQ ID NO: 38840 - DNA, 32 bp, Artificial Sequence; identical to SEQ ID NO: 4264
  Probe

SEQ ID NO: 38841 - DNA, 33 bp, Artificial Sequence; identical to SEQ ID NO: 4265
  Probe

SEQ ID NO: 38842 - DNA, 34 bp, Artificial Sequence; identical to SEQ ID NO: 4266
  Probe

SEQ ID NO: 38843 - DNA, 35 bp, Artificial Sequence; identical to SEQ ID NO: 4267
  Probe

SEQ ID NO: 38844 - DNA, 36 bp, Artificial Sequence; identical to SEQ ID NO: 4268
  Probe

SEQ ID NO: 38845 - DNA, 37 bp, Artificial Sequence; identical to SEQ ID NO: 4269
  Probe

SEQ ID NO: 38846 - DNA, 38 bp, Artificial Sequence; identical to SEQ ID NO: 4270
  Probe

SEQ ID NO: 38847 - DNA, 41 bp, Artificial Sequence; identical to SEQ ID NO: 4273
  Probe

SEQ ID NO: 38848 - DNA, 42 bp, Artificial Sequence; identical to SEQ ID NO: 4274
  Probe

SEQ ID NO: 38849 - DNA, 43 bp, Artificial Sequence; identical to SEQ ID NO: 4275
  Probe

SEQ ID NO: 38850 - DNA, 44 bp, Artificial Sequence; identical to SEQ ID NO: 4276
  Probe

SEQ ID NO: 38851 - DNA, 45 bp, Artificial Sequence; identical to SEQ ID NO: 4277
  Probe

SEQ ID NO: 38852 - DNA, 46 bp, Artificial Sequence; identical to SEQ ID NO: 4278
  Probe

SEQ ID NO: 38853 - DNA, 50 bp, Artificial Sequence; identical to SEQ ID NO: 4281
  Probe

SEQ ID NO: 38854 - DNA, 18 bp, Artificial Sequence
  Probe
cagatcaagaggtccccg

SEQ ID NO: 38855 - DNA, 50 bp, Artificial Sequence; identical to SEQ ID NO: 4284
  Probe

SEQ ID NO: 38856 - DNA, 29 bp, Artificial Sequence
  Probe
cagcaacctcggttcgaatccgagtcacg

SEQ ID NO: 38857 - DNA, 30 bp, Artificial Sequence; identical to SEQ ID NO: 17915
  Probe

SEQ ID NO: 38858 - DNA, 35 bp, Artificial Sequence; identical to SEQ ID NO: 4288
  Probe

SEQ ID NO: 38859 - DNA, 35 bp, Artificial Sequence; identical to SEQ ID NO: 4290
  Probe

SEQ ID NO: 38860 - DNA, 18 bp, Artificial Sequence
  Probe
cagcacgccctcccattt

SEQ ID NO: 38861 - DNA, 28 bp, Artificial Sequence
  Probe
cagcacttccacaagtacatttccttat

SEQ ID NO: 38862 - DNA, 35 bp, Artificial Sequence; identical to SEQ ID NO: 4293
  Probe

SEQ ID NO: 38863 - DNA, 30 bp, Artificial Sequence
  Probe
cagcgatccgagttcaagtctcggtggaac

SEQ ID NO: 38864 - DNA, 50 bp, Artificial Sequence; identical to SEQ ID NO: 532
  Probe

SEQ ID NO: 38865 - DNA, 34 bp, Artificial Sequence; identical to SEQ ID NO: 4335
  Probe

SEQ ID NO: 38866 - DNA, 35 bp, Artificial Sequence; identical to SEQ ID NO: 4336
  Probe

SEQ ID NO: 38867 - DNA, 36 bp, Artificial Sequence; identical to SEQ ID NO: 4337
  Probe

SEQ ID NO: 38868 - DNA, 31 bp, Artificial Sequence; identical to SEQ ID NO: 17966
  Probe

SEQ ID NO: 38869 - DNA, 34 bp, Artificial Sequence
  Probe
caggagatcctgggttcgactcccagcggggcct

SEQ ID NO: 38870 - DNA, 33 bp, Artificial Sequence; identical to SEQ ID NO: 4339
  Probe

SEQ ID NO: 38871 - DNA, 39 bp, Artificial Sequence
  Probe
cagggcctggatagctcagttggtagaacatcagacttt

SEQ ID NO: 38872 - DNA, 41 bp, Artificial Sequence
  Probe
cagggcctggatagctcagttggtagaacatcagactttta

SEQ ID NO: 38873 - DNA, 30 bp, Artificial Sequence; identical to SEQ ID NO: 17999
  Probe

SEQ ID NO: 38874 - DNA, 31 bp, Artificial Sequence; identical to SEQ ID NO: 18000
  Probe

SEQ ID NO: 38875 - DNA, 32 bp, Artificial Sequence
  Probe
caggtggcccgggttcgactcccggtatggga

SEQ ID NO: 38876 - DNA, 33 bp, Artificial Sequence; identical to SEQ ID NO: 18001
  Probe

SEQ ID NO: 38877 - DNA, 27 bp, Artificial Sequence
  Probe
cagtcagaggttcaattcctcttctta

SEQ ID NO: 38878 - DNA, 30 bp, Artificial Sequence; identical to SEQ ID NO: 4358
  Probe

SEQ ID NO: 38879 - DNA, 33 bp, Artificial Sequence; identical to SEQ ID NO: 4360
  Probe

SEQ ID NO: 38880 - DNA, 18 bp, Artificial Sequence
  Probe
cagtcggtagagcatgag

SEQ ID NO: 38881 - DNA, 17 bp, Artificial Sequence
  Probe
cagtcggtagagcatgg

SEQ ID NO: 38882 - DNA, 27 bp, Artificial Sequence
  Probe
cagtctcataatctgaaggtcctgagt

SEQ ID NO: 38883 - DNA, 30 bp, Artificial Sequence
  Probe
cagtggaaccacggcgtgattcataccttt

SEQ ID NO: 38884 - DNA, 18 bp, Artificial Sequence
  Probe
cagtggtagaattctcgc

SEQ ID NO: 38885 - DNA, 20 bp, Artificial Sequence
  Probe
cagtggtagaattctcgcct

SEQ ID NO: 38886 - DNA, 21 bp, Artificial Sequence
  Probe
cagtggtagaattctcgcctc

SEQ ID NO: 38887 - DNA, 22 bp, Artificial Sequence
  Probe
cagtggtagaattctcgcctcc

SEQ ID NO: 38888 - DNA, 21 bp, Artificial Sequence
  Probe
cagtggtagaattctcgcctg

SEQ ID NO: 38889 - DNA, 22 bp, Artificial Sequence
  Probe
cagtggtagaattctcgcctgc

SEQ ID NO: 38890 - DNA, 18 bp, Artificial Sequence
  Probe
cagtggtagagcatttga

SEQ ID NO: 38891 - DNA, 23 bp, Artificial Sequence
  Probe
cagttgacccgggttcgattccc

SEQ ID NO: 38892 - DNA, 27 bp, Artificial Sequence
  Probe
cagttgacccgggttcgattcccggcc

SEQ ID NO: 38893 - DNA, 32 bp, Artificial Sequence
  Probe
cagttgacccgggttcgattcccggccaacgc

SEQ ID NO: 38894 - DNA, 36 bp, Artificial Sequence; identical to SEQ ID NO: 4381
  Probe

SEQ ID NO: 38895 - DNA, 50 bp, Artificial Sequence; identical to SEQ ID NO: 538
  Probe

SEQ ID NO: 38896 - DNA, 17 bp, Artificial Sequence
  Probe
cagttggtagagcatca

SEQ ID NO: 38897 - DNA, 18 bp, Artificial Sequence
  Probe
cagttggtagagcatcag

SEQ ID NO: 38898 - DNA, 32 bp, Artificial Sequence
  Probe
cagttttccttcctgtcccgtacggtttttct

SEQ ID NO: 38899 - DNA, 45 bp, Artificial Sequence; identical to SEQ ID NO: 4385
  Probe

SEQ ID NO: 38900 - DNA, 46 bp, Artificial Sequence; identical to SEQ ID NO: 4386
  Probe

SEQ ID NO: 38901 - DNA, 50 bp, Artificial Sequence; identical to SEQ ID NO: 4387
  Probe

SEQ ID NO: 38902 - DNA, 17 bp, Artificial Sequence
  Probe
cataacccagaggtcga

SEQ ID NO: 38903 - DNA, 18 bp, Artificial Sequence
  Probe
cataatctgaaggtcctg

SEQ ID NO: 38904 - DNA, 19 bp, Artificial Sequence
  Probe
cataatctgaaggtcctga

SEQ ID NO: 38905 - DNA, 20 bp, Artificial Sequence
  Probe
cataatctgaaggtcctgag

SEQ ID NO: 38906 - DNA, 21 bp, Artificial Sequence
  Probe
cataatctgaaggtcctgagt

SEQ ID NO: 38907 - DNA, 21 bp, Artificial Sequence
  Probe
cataatctgaaggtcgtgagt

SEQ ID NO: 38908 - DNA, 24 bp, Artificial Sequence
  Probe
catagctcaggggttagagcactg

SEQ ID NO: 38909 - DNA, 50 bp, Artificial Sequence
  Probe
catagctgccttccaagcagttgacccgggttcgattcccggccaacgca

SEQ ID NO: 38910 - DNA, 29 bp, Artificial Sequence
  Probe
catatcattggtcgtggttgtagtccgtg

SEQ ID NO: 38911 - DNA, 31 bp, Artificial Sequence; identical to SEQ ID NO: 540
  Probe

SEQ ID NO: 38912 - DNA, 50 bp, Artificial Sequence; identical to SEQ ID NO: 4406
  Probe

SEQ ID NO: 38913 - DNA, 37 bp, Artificial Sequence
  Probe
catctggggcattggtggttcagtggtagaattctcg

SEQ ID NO: 38914 - DNA, 23 bp, Artificial Sequence
  Probe
catctggggtggcctgtgacttt

SEQ ID NO: 38915 - DNA, 50 bp, Artificial Sequence
  Probe
catgagactcttaatctcagggtcgtgggttcgagccccacgttgggcgt

SEQ ID NO: 38916 - DNA, 41 bp, Artificial Sequence
  Probe
catgaggtcccgggttcgatccccagcatctccagtgtttt

SEQ ID NO: 38917 - DNA, 27 bp, Artificial Sequence
  Probe
catgcccccatgtctaacaacatggct

SEQ ID NO: 38918 - DNA, 28 bp, Artificial Sequence
  Probe
catgcccccatgtctaacaacatggctt

SEQ ID NO: 38919 - DNA, 29 bp, Artificial Sequence
  Probe
catgcccccatgtctaacaacatggcttt

SEQ ID NO: 38920 - DNA, 30 bp, Artificial Sequence; identical to SEQ ID NO: 4433
  Probe

SEQ ID NO: 38921 - DNA, 31 bp, Artificial Sequence; identical to SEQ ID NO: 4434
  Probe

SEQ ID NO: 38922 - DNA, 32 bp, Artificial Sequence; identical to SEQ ID NO: 4435
  Probe

SEQ ID NO: 38923 - DNA, 33 bp, Artificial Sequence; identical to SEQ ID NO: 4436
  Probe

SEQ ID NO: 38924 - DNA, 34 bp, Artificial Sequence; identical to SEQ ID NO: 4437
  Probe

SEQ ID NO: 38925 - DNA, 35 bp, Artificial Sequence; identical to SEQ ID NO: 4438
  Probe

SEQ ID NO: 38926 - DNA, 36 bp, Artificial Sequence; identical to SEQ ID NO: 4439
  Probe

SEQ ID NO: 38927 - DNA, 37 bp, Artificial Sequence; identical to SEQ ID NO: 18101
  Probe

SEQ ID NO: 38928 - DNA, 39 bp, Artificial Sequence; identical to SEQ ID NO: 18103
  Probe

SEQ ID NO: 38929 - DNA, 27 bp, Artificial Sequence
  Probe
catgggtggttcagtggtagaattctc

SEQ ID NO: 38930 - DNA, 29 bp, Artificial Sequence
  Probe
catgggtggttcagtggtagaattctcgc

SEQ ID NO: 38931 - DNA, 22 bp, Artificial Sequence
  Probe
catggtctagcggttaggattc

SEQ ID NO: 38932 - DNA, 32 bp, Artificial Sequence; identical to SEQ ID NO: 4447
  Probe

SEQ ID NO: 38933 - DNA, 50 bp, Artificial Sequence; identical to SEQ ID NO: 4448
  Probe

SEQ ID NO: 38934 - DNA, 34 bp, Artificial Sequence; identical to SEQ ID NO: 18117
  Probe

SEQ ID NO: 38935 - DNA, 35 bp, Artificial Sequence
  Probe
cattcttgcgacccgggttcgattcccgggcggcg

SEQ ID NO: 38936 - DNA, 50 bp, Artificial Sequence; identical to SEQ ID NO: 4456
  Probe

SEQ ID NO: 38937 - DNA, 20 bp, Artificial Sequence
  Probe
cattggggtctccccgcgca

SEQ ID NO: 38938 - DNA, 21 bp, Artificial Sequence
  Probe
cattggggtctccccgcgcag

SEQ ID NO: 38939 - DNA, 22 bp, Artificial Sequence
  Probe
cattggggtctccccgcgcagg

SEQ ID NO: 38940 - DNA, 23 bp, Artificial Sequence
  Probe
cattggggtctccccgcgcaggt

SEQ ID NO: 38941 - DNA, 22 bp, Artificial Sequence
  Probe
cattggggtttccccgcgcagg

SEQ ID NO: 38942 - DNA, 28 bp, Artificial Sequence
  Probe
cattggtggttcagtggtagaattctcg

SEQ ID NO: 38943 - DNA, 30 bp, Artificial Sequence; identical to SEQ ID NO: 4473
  Probe

SEQ ID NO: 38944 - DNA, 50 bp, Artificial Sequence; identical to SEQ ID NO: 4482
  Probe

SEQ ID NO: 38945 - DNA, 29 bp, Artificial Sequence
  Probe
ccaaagacaccccccacagtttatgtagc

SEQ ID NO: 38946 - DNA, 30 bp, Artificial Sequence; identical to SEQ ID NO: 18159
  Probe

SEQ ID NO: 38947 - DNA, 32 bp, Artificial Sequence; identical to SEQ ID NO: 18161
  Probe

SEQ ID NO: 38948 - DNA, 33 bp, Artificial Sequence; identical to SEQ ID NO: 18162
  Probe

SEQ ID NO: 38949 - DNA, 34 bp, Artificial Sequence; identical to SEQ ID NO: 18163
  Probe

SEQ ID NO: 38950 - DNA, 35 bp, Artificial Sequence; identical to SEQ ID NO: 18164
  Probe

SEQ ID NO: 38951 - DNA, 37 bp, Artificial Sequence; identical to SEQ ID NO: 18166
  Probe

SEQ ID NO: 38952 - DNA, 38 bp, Artificial Sequence; identical to SEQ ID NO: 18167
  Probe

SEQ ID NO: 38953 - DNA, 50 bp, Artificial Sequence; identical to SEQ ID NO: 4485
  Probe

SEQ ID NO: 38954 - DNA, 19 bp, Artificial Sequence
  Probe
ccaacacctctttacagtg

SEQ ID NO: 38955 - DNA, 23 bp, Artificial Sequence
  Probe
ccaacacctctttacagtgaaat

SEQ ID NO: 38956 - DNA, 50 bp, Artificial Sequence; identical to SEQ ID NO: 4510
  Probe

SEQ ID NO: 38957 - DNA, 18 bp, Artificial Sequence
  Probe
ccaagcagttgacccggg

SEQ ID NO: 38958 - DNA, 37 bp, Artificial Sequence
  Probe
ccaagcagttgacccgggttcgattcccggccaacgc

SEQ ID NO: 38959 - DNA, 41 bp, Artificial Sequence; identical to SEQ ID NO: 18195
  Probe

SEQ ID NO: 38960 - DNA, 33 bp, Artificial Sequence
  Probe
ccaagtgatggtttccctctggcagttctcaag

SEQ ID NO: 38961 - DNA, 33 bp, Artificial Sequence
  Probe
ccaagttgttttatcctatctgcccaatactat

SEQ ID NO: 38962 - DNA, 21 bp, Artificial Sequence
  Probe
ccaatgcacgagtacagtttt

SEQ ID NO: 38963 - DNA, 22 bp, Artificial Sequence
  Probe
ccaatggggtttccccgcacag

SEQ ID NO: 38964 - DNA, 25 bp, Artificial Sequence
  Probe
ccacacctcagaaggtctcactttt

SEQ ID NO: 38965 - DNA, 26 bp, Artificial Sequence
  Probe
ccacatggtctagcggttaggattcc

SEQ ID NO: 38966 - DNA, 28 bp, Artificial Sequence
  Probe
ccacatggtctagcggttaggattcctg

SEQ ID NO: 38967 - DNA, 33 bp, Artificial Sequence
  Probe
ccaccgctgccacacctcagaaggtctcacttt

SEQ ID NO: 38968 - DNA, 34 bp, Artificial Sequence; identical to SEQ ID NO: 18231
  Probe

SEQ ID NO: 38969 - DNA, 32 bp, Artificial Sequence
  Probe
ccacgagggttctcaccttctctctccgattt

SEQ ID NO: 38970 - DNA, 36 bp, Artificial Sequence; identical to SEQ ID NO: 29823
  Probe

SEQ ID NO: 38971 - DNA, 37 bp, Artificial Sequence
  Probe
ccacgcgggagacccgggttcaattcccggccaatgc

SEQ ID NO: 38972 - DNA, 50 bp, Artificial Sequence
  Probe
ccacgcgggagacccgggtttaattcccggtcaagataagaggtattttt

SEQ ID NO: 38973 - DNA, 20 bp, Artificial Sequence
  Probe
ccacgcgggaggcccgggtt

SEQ ID NO: 38974 - DNA, 28 bp, Artificial Sequence
  Probe
ccacgcgggaggcccgggttcgattccc

SEQ ID NO: 38975 - DNA, 32 bp, Artificial Sequence
  Probe
ccacgcgggaggcccgggttcgattcccggcc

SEQ ID NO: 38976 - DNA, 33 bp, Artificial Sequence
  Probe
ccacgcgggaggcccgggttcgattcccggcca

SEQ ID NO: 38977 - DNA, 35 bp, Artificial Sequence
  Probe
ccacgcgggaggcccgggttcgattcccggccaat

SEQ ID NO: 38978 - DNA, 37 bp, Artificial Sequence
  Probe
ccacgcgggaggcccgggttcgattcccggccaatgc

SEQ ID NO: 38979 - DNA, 50 bp, Artificial Sequence
  Probe
ccacgcgggaggcccgggttcgattcccggccaatgcaacgatgacgttt

SEQ ID NO: 38980 - DNA, 50 bp, Artificial Sequence
  Probe
ccacgcgggaggcccgggttcgattcccggccaatgcaagttttgacttc

SEQ ID NO: 38981 - DNA, 49 bp, Artificial Sequence
  Probe
ccacgcgggaggcccgggttcgattcccggccaatgcacgagtacagtt

SEQ ID NO: 38982 - DNA, 50 bp, Artificial Sequence
  Probe
ccacgcgggaggcccgggttcgattcccggccaatgcacgagtacagttt

SEQ ID NO: 38983 - DNA, 34 bp, Artificial Sequence
  Probe
ccacgcgggaggcccgggttcgattcccggccca

SEQ ID NO: 38984 - DNA, 41 bp, Artificial Sequence; identical to SEQ ID NO: 4534
  Probe

SEQ ID NO: 38985 - DNA, 22 bp, Artificial Sequence
  Probe
ccacggcgtgattcataccttt

SEQ ID NO: 38986 - DNA, 23 bp, Artificial Sequence
  Probe
ccacggcgtgattcatacctttt

SEQ ID NO: 38987 - DNA, 35 bp, Artificial Sequence; identical to SEQ ID NO: 4558
  Probe

SEQ ID NO: 38988 - DNA, 36 bp, Artificial Sequence; identical to SEQ ID NO: 4559
  Probe

SEQ ID NO: 38989 - DNA, 37 bp, Artificial Sequence; identical to SEQ ID NO: 4560
  Probe

SEQ ID NO: 38990 - DNA, 46 bp, Artificial Sequence
  Probe
ccagggattgtgggttcgagtcccatctggggtggcctgtgacttt

SEQ ID NO: 38991 - DNA, 50 bp, Artificial Sequence
  Probe
ccagggattgtgggttcgagtcccatctggggtggcctgtgacttttgtc

SEQ ID NO: 38992 - DNA, 32 bp, Artificial Sequence
  Probe
ccaggtggcccgggttcgactcccggtatggg

SEQ ID NO: 38993 - DNA, 34 bp, Artificial Sequence; identical to SEQ ID NO: 18285
  Probe

SEQ ID NO: 38994 - DNA, 37 bp, Artificial Sequence; identical to SEQ ID NO: 4571
  Probe

SEQ ID NO: 38995 - DNA, 20 bp, Artificial Sequence
  Probe
ccagtctcttcgggggcgtg

SEQ ID NO: 38996 - DNA, 31 bp, Artificial Sequence
  Probe
ccagtggaaccacggcgtgattcataccttt

SEQ ID NO: 38997 - DNA, 50 bp, Artificial Sequence; identical to SEQ ID NO: 4574
  Probe

SEQ ID NO: 38998 - DNA, 33 bp, Artificial Sequence
  Probe
ccagttttccttcctgtcccgtacggtttttct

SEQ ID NO: 38999 - DNA, 22 bp, Artificial Sequence
  Probe
ccataacccagaggtcgatgga

SEQ ID NO: 39000 - DNA, 44 bp, Artificial Sequence; identical to SEQ ID NO: 4575
  Probe

SEQ ID NO: 39001 - DNA, 50 bp, Artificial Sequence
  Probe
ccataacccagaggtcgatggatcgaaaccatcctctgctaggtgcctgt

SEQ ID NO: 39002 - DNA, 24 bp, Artificial Sequence
  Probe
ccatagtgtagtggttatcacgtc

SEQ ID NO: 39003 - DNA, 27 bp, Artificial Sequence
  Probe
ccatagtgtagtggttatcacgtctgc

SEQ ID NO: 39004 - DNA, 23 bp, Artificial Sequence
  Probe
ccatcctctgctatcggagtttt

SEQ ID NO: 39005 - DNA, 24 bp, Artificial Sequence
  Probe
ccatctggggtggcctgtgacttt

SEQ ID NO: 39006 - DNA, 25 bp, Artificial Sequence
  Probe
ccatggtgtaatggttagcactctg

SEQ ID NO: 39007 - DNA, 34 bp, Artificial Sequence
  Probe
ccattcttgcgacccgggttcgattcccgggcgg

SEQ ID NO: 39008 - DNA, 35 bp, Artificial Sequence
  Probe
ccattcttgcgacccgggttcgattcccgggcggc

SEQ ID NO: 39009 - DNA, 36 bp, Artificial Sequence; identical to SEQ ID NO: 29866
  Probe

SEQ ID NO: 39010 - DNA, 38 bp, Artificial Sequence
  Probe
ccattcttgcgacccgggttcgattcccgggcggcgca

SEQ ID NO: 39011 - DNA, 41 bp, Artificial Sequence; identical to SEQ ID NO: 4587
  Probe

SEQ ID NO: 39012 - DNA, 22 bp, Artificial Sequence
  Probe
ccattggggtctccccgcgcag

SEQ ID NO: 39013 - DNA, 24 bp, Artificial Sequence
  Probe
ccattggggtctccccgcgcaggt

SEQ ID NO: 39014 - DNA, 22 bp, Artificial Sequence
  Probe
ccattggggtttccccgcgcag

SEQ ID NO: 39015 - DNA, 24 bp, Artificial Sequence
  Probe
ccattggggtttccccgcgcaggt

SEQ ID NO: 39016 - DNA, 18 bp, Artificial Sequence
  Probe
cccaaacccactccacct

SEQ ID NO: 39017 - DNA, 30 bp, Artificial Sequence; identical to SEQ ID NO: 18324
  Probe

SEQ ID NO: 39018 - DNA, 31 bp, Artificial Sequence; identical to SEQ ID NO: 4596
  Probe

SEQ ID NO: 39019 - DNA, 32 bp, Artificial Sequence; identical to SEQ ID NO: 18326
  Probe

SEQ ID NO: 39020 - DNA, 33 bp, Artificial Sequence; identical to SEQ ID NO: 18327
  Probe

SEQ ID NO: 39021 - DNA, 34 bp, Artificial Sequence
  Probe
cccaaagacaccccccacagtttatgtagcttac

SEQ ID NO: 39022 - DNA, 35 bp, Artificial Sequence; identical to SEQ ID NO: 18328
  Probe

SEQ ID NO: 39023 - DNA, 36 bp, Artificial Sequence; identical to SEQ ID NO: 18329
  Probe

SEQ ID NO: 39024 - DNA, 50 bp, Artificial Sequence; identical to SEQ ID NO: 4613
  Probe

SEQ ID NO: 39025 - DNA, 30 bp, Artificial Sequence; identical to SEQ ID NO: 4619
  Probe

SEQ ID NO: 39026 - DNA, 33 bp, Artificial Sequence; identical to SEQ ID NO: 581
  Probe

SEQ ID NO: 39027 - DNA, 24 bp, Artificial Sequence
  Probe
cccaccactgccagtggtacgttt

SEQ ID NO: 39028 - DNA, 24 bp, Artificial Sequence
  Probe
cccacccaagaacagggtttgtta

SEQ ID NO: 39029 - DNA, 27 bp, Artificial Sequence
  Probe
cccacccagggacgcgtggtgactttt

SEQ ID NO: 39030 - DNA, 28 bp, Artificial Sequence
  Probe
cccacccagggacggtcagtgcttcttt

SEQ ID NO: 39031 - DNA, 34 bp, Artificial Sequence; identical to SEQ ID NO: 4627
  Probe

SEQ ID NO: 39032 - DNA, 35 bp, Artificial Sequence; identical to SEQ ID NO: 18382
  Probe

SEQ ID NO: 39033 - DNA, 25 bp, Artificial Sequence
  Probe
cccaccgctgccaggctggagtttt

SEQ ID NO: 39034 - DNA, 30 bp, Artificial Sequence
  Probe
cccagcacttccacaagtacatttccttat

SEQ ID NO: 39035 - DNA, 20 bp, Artificial Sequence
  Probe
cccagcatctccagtgtttt

SEQ ID NO: 39036 - DNA, 24 bp, Artificial Sequence
  Probe
cccagggacggtcagtgcttcttt

SEQ ID NO: 39037 - DNA, 25 bp, Artificial Sequence
  Probe
cccagggacggtcagtgcttctttt

SEQ ID NO: 39038 - DNA, 33 bp, Artificial Sequence; identical to SEQ ID NO: 18405
  Probe

SEQ ID NO: 39039 - DNA, 23 bp, Artificial Sequence
  Probe
cccataacccagaggtcgatgga

SEQ ID NO: 39040 - DNA, 45 bp, Artificial Sequence
  Probe
cccataacccagaggtcgatggatcgaaaccatcctctgctaggg

SEQ ID NO: 39041 - DNA, 45 bp, Artificial Sequence; identical to SEQ ID NO: 18409
  Probe

SEQ ID NO: 39042 - DNA, 50 bp, Artificial Sequence
  Probe
cccataacccagaggtcgatggatcgaaaccatcctctgctaggtccttt

SEQ ID NO: 39043 - DNA, 50 bp, Artificial Sequence
  Probe
cccataacccagaggtcgatggatcgaaaccatcctctgctaggtgcctg

SEQ ID NO: 39044 - DNA, 50 bp, Artificial Sequence
  Probe
cccataacccagaggtcgatggatcgaaaccatcctctgctatagactcc

SEQ ID NO: 39045 - DNA, 45 bp, Artificial Sequence
  Probe
cccataacccagaggtcgatggatcgaaaccatcctctgctatcg

SEQ ID NO: 39046 - DNA, 50 bp, Artificial Sequence
  Probe
cccataacccagaggtcgatggatcgaaaccatcctctgctatcggagtt

SEQ ID NO: 39047 - DNA, 45 bp, Artificial Sequence
  Probe
cccataacccagaggtcgatggatcgaaaccatcctctgctattt

SEQ ID NO: 39048 - DNA, 21 bp, Artificial Sequence
  Probe
cccataacccagaggttgatg

SEQ ID NO: 39049 - DNA, 20 bp, Artificial Sequence
  Probe
cccataccccgaaaatgttg

SEQ ID NO: 39050 - DNA, 32 bp, Artificial Sequence; identical to SEQ ID NO: 4640
  Probe

SEQ ID NO: 39051 - DNA, 43 bp, Artificial Sequence; identical to SEQ ID NO: 4644
  Probe

SEQ ID NO: 39052 - DNA, 24 bp, Artificial Sequence
  Probe
cccatgcagcacgccctcccattt

SEQ ID NO: 39053 - DNA, 25 bp, Artificial Sequence
  Probe
cccatgcagcacgccctcccatttt

SEQ ID NO: 39054 - DNA, 37 bp, Artificial Sequence; identical to SEQ ID NO: 599
  Probe

SEQ ID NO: 39055 - DNA, 42 bp, Artificial Sequence; identical to SEQ ID NO: 4656
  Probe

SEQ ID NO: 39056 - DNA, 20 bp, Artificial Sequence
  Probe
cccattggggtctccccgcg

SEQ ID NO: 39057 - DNA, 22 bp, Artificial Sequence
  Probe
cccattggggtctccccgcgca

SEQ ID NO: 39058 - DNA, 23 bp, Artificial Sequence
  Probe
cccattggggtctccccgcgcag

SEQ ID NO: 39059 - DNA, 25 bp, Artificial Sequence
  Probe
cccattggggtctccccgcgcaggt

SEQ ID NO: 39060 - DNA, 29 bp, Artificial Sequence
  Probe
ccccaaaaattttggtgcaactccaaata

SEQ ID NO: 39061 - DNA, 35 bp, Artificial Sequence; identical to SEQ ID NO: 18441
  Probe

SEQ ID NO: 39062 - DNA, 38 bp, Artificial Sequence; identical to SEQ ID NO: 4673
  Probe

SEQ ID NO: 39063 - DNA, 22 bp, Artificial Sequence
  Probe
ccccatgtctaacaacatggct

SEQ ID NO: 39064 - DNA, 31 bp, Artificial Sequence; identical to SEQ ID NO: 4684
  Probe

SEQ ID NO: 39065 - DNA, 23 bp, Artificial Sequence
  Probe
cccccatgtctaacaacatggct

SEQ ID NO: 39066 - DNA, 24 bp, Artificial Sequence
  Probe
cccccatgtctaacaacatggctt

SEQ ID NO: 39067 - DNA, 25 bp, Artificial Sequence
  Probe
cccccatgtctaacaacatggcttt

SEQ ID NO: 39068 - DNA, 26 bp, Artificial Sequence
  Probe
cccccatgtctaacaacatggctttc

SEQ ID NO: 39069 - DNA, 27 bp, Artificial Sequence
  Probe
cccccatgtctaacaacatggctttct

SEQ ID NO: 39070 - DNA, 28 bp, Artificial Sequence
  Probe
cccccatgtctaacaacatggctttctc

SEQ ID NO: 39071 - DNA, 29 bp, Artificial Sequence
  Probe
cccccatgtctaacaacatggctttctca

SEQ ID NO: 39072 - DNA, 31 bp, Artificial Sequence; identical to SEQ ID NO: 4695
  Probe

SEQ ID NO: 39073 - DNA, 32 bp, Artificial Sequence; identical to SEQ ID NO: 4696
  Probe

SEQ ID NO: 39074 - DNA, 30 bp, Artificial Sequence; identical to SEQ ID NO: 18484
  Probe

SEQ ID NO: 39075 - DNA, 34 bp, Artificial Sequence
  Probe
ccccgcacaggttcgaatcctgttcgtgacgggt

SEQ ID NO: 39076 - DNA, 50 bp, Artificial Sequence; identical to SEQ ID NO: 4704
  Probe

SEQ ID NO: 39077 - DNA, 30 bp, Artificial Sequence
  Probe
ccccgggttcaatccccggcatctccagac

SEQ ID NO: 39078 - DNA, 33 bp, Artificial Sequence
  Probe
ccccgggttcaatccccggcatctccagacttt

SEQ ID NO: 39079 - DNA, 34 bp, Artificial Sequence
  Probe
ccccgggttcaatccccggcatctccagactttt

SEQ ID NO: 39080 - DNA, 30 bp, Artificial Sequence; identical to SEQ ID NO: 4721
  Probe

SEQ ID NO: 39081 - DNA, 26 bp, Artificial Sequence
  Probe
cccctggcggtctagtggttaggatt

SEQ ID NO: 39082 - DNA, 28 bp, Artificial Sequence
  Probe
cccctggcggtctagtggttaggattcg

SEQ ID NO: 39083 - DNA, 29 bp, Artificial Sequence
  Probe
cccctggcggtctagtggttaggattcgg

SEQ ID NO: 39084 - DNA, 31 bp, Artificial Sequence; identical to SEQ ID NO: 18512
  Probe

SEQ ID NO: 39085 - DNA, 50 bp, Artificial Sequence; identical to SEQ ID NO: 4737
  Probe

SEQ ID NO: 39086 - DNA, 28 bp, Artificial Sequence
  Probe
cccgcgcaggttcaaatcctgctcacag

SEQ ID NO: 39087 - DNA, 28 bp, Artificial Sequence
  Probe
cccggatagctcagtcggtagagcatca

SEQ ID NO: 39088 - DNA, 34 bp, Artificial Sequence; identical to SEQ ID NO: 619
  Probe

SEQ ID NO: 39089 - DNA, 50 bp, Artificial Sequence
  Probe
cccggatagctcagtcggtagagcatcagacttttaatctgagggtccag

SEQ ID NO: 39090 - DNA, 31 bp, Artificial Sequence; identical to SEQ ID NO: 621
  Probe

SEQ ID NO: 39091 - DNA, 29 bp, Artificial Sequence
  Probe
cccggctagctcagtcggtagagcatggg

SEQ ID NO: 39092 - DNA, 31 bp, Artificial Sequence; identical to SEQ ID NO: 626
  Probe

SEQ ID NO: 39093 - DNA, 17 bp, Artificial Sequence
  Probe
cccgggttcgatcccca

SEQ ID NO: 39094 - DNA, 18 bp, Artificial Sequence
  Probe
cccgggttcgatccccag

SEQ ID NO: 39095 - DNA, 24 bp, Artificial Sequence
  Probe
cccgggttcgatccccagcatctc

SEQ ID NO: 39096 - DNA, 26 bp, Artificial Sequence
  Probe
cccgggttcgatccccagcatctcca

SEQ ID NO: 39097 - DNA, 33 bp, Artificial Sequence
  Probe
cccgggttcgatccccagcatctccagtgtttt

SEQ ID NO: 39098 - DNA, 50 bp, Artificial Sequence; identical to SEQ ID NO: 632
  Probe

SEQ ID NO: 39099 - DNA, 21 bp, Artificial Sequence
  Probe
cccgtaacccagaggtcaatg

SEQ ID NO: 39100 - DNA, 32 bp, Artificial Sequence
  Probe
ccctcctcgttagtatagtggtgagtatcccc

SEQ ID NO: 39101 - DNA, 18 bp, Artificial Sequence
  Probe
ccctcgtggctactgttt

SEQ ID NO: 39102 - DNA, 19 bp, Artificial Sequence
  Probe
ccctctggcagttctcaag

SEQ ID NO: 39103 - DNA, 28 bp, Artificial Sequence
  Probe
ccctctgtgctccggagttacctcgttt

SEQ ID NO: 39104 - DNA, 30 bp, Artificial Sequence
  Probe
ccctggcggtctagtggttaggattcggcg

SEQ ID NO: 39105 - DNA, 27 bp, Artificial Sequence
  Probe
ccctggtggtctagtggctaggattcg

SEQ ID NO: 39106 - DNA, 28 bp, Artificial Sequence
  Probe
ccctggtggtctagtggctaggattcgg

SEQ ID NO: 39107 - DNA, 25 bp, Artificial Sequence
  Probe
ccctggtggtctagtggttaggatt

SEQ ID NO: 39108 - DNA, 26 bp, Artificial Sequence
  Probe
ccctggtggtctagtggttaggattc

SEQ ID NO: 39109 - DNA, 27 bp, Artificial Sequence
  Probe
ccctggtggtctagtggttaggattcg

SEQ ID NO: 39110 - DNA, 28 bp, Artificial Sequence
  Probe
ccctggtggtctagtggttaggattcgg

SEQ ID NO: 39111 - DNA, 29 bp, Artificial Sequence
  Probe
ccctggtggtctagtggttaggattcggc

SEQ ID NO: 39112 - DNA, 31 bp, Artificial Sequence; identical to SEQ ID NO: 638
  Probe

SEQ ID NO: 39113 - DNA, 30 bp, Artificial Sequence
  Probe
ccctggttcaatccctggtacctccatttt

SEQ ID NO: 39114 - DNA, 26 bp, Artificial Sequence
  Probe
ccctgtgttgagcacatgtttccttt

SEQ ID NO: 39115 - DNA, 34 bp, Artificial Sequence; identical to SEQ ID NO: 4784
  Probe

SEQ ID NO: 39116 - DNA, 32 bp, Artificial Sequence
  Probe
ccgagaggtcccgggttcaaatcccggacgag

SEQ ID NO: 39117 - DNA, 17 bp, Artificial Sequence
  Probe
ccgcagcaacctcggtt

SEQ ID NO: 39118 - DNA, 32 bp, Artificial Sequence; identical to SEQ ID NO: 4790
  Probe

SEQ ID NO: 39119 - DNA, 34 bp, Artificial Sequence
  Probe
ccgcagcaacctcggttcgaatccgagtcacggc

SEQ ID NO: 39120 - DNA, 35 bp, Artificial Sequence; identical to SEQ ID NO: 18619
  Probe

SEQ ID NO: 39121 - DNA, 38 bp, Artificial Sequence; identical to SEQ ID NO: 4794
  Probe

SEQ ID NO: 39122 - DNA, 38 bp, Artificial Sequence; identical to SEQ ID NO: 4796
  Probe

SEQ ID NO: 39123 - DNA, 36 bp, Artificial Sequence; identical to SEQ ID NO: 4797
  Probe

SEQ ID NO: 39124 - DNA, 36 bp, Artificial Sequence; identical to SEQ ID NO: 4798
  Probe

SEQ ID NO: 39125 - DNA, 36 bp, Artificial Sequence; identical to SEQ ID NO: 4800
  Probe

SEQ ID NO: 39126 - DNA, 38 bp, Artificial Sequence; identical to SEQ ID NO: 4802
  Probe

SEQ ID NO: 39127 - DNA, 27 bp, Artificial Sequence
  Probe
ccgcctgtcacgcgggagaccggggtt

SEQ ID NO: 39128 - DNA, 26 bp, Artificial Sequence
  Probe
ccgcgcaggttcaaatcctgctcaca

SEQ ID NO: 39129 - DNA, 27 bp, Artificial Sequence
  Probe
ccgcgcaggttcaaatcctgctcacag

SEQ ID NO: 39130 - DNA, 32 bp, Artificial Sequence; identical to SEQ ID NO: 4808
  Probe

SEQ ID NO: 39131 - DNA, 35 bp, Artificial Sequence; identical to SEQ ID NO: 4812
  Probe

SEQ ID NO: 39132 - DNA, 30 bp, Artificial Sequence
  Probe
ccgctgccacacctcagaaggtctcacttt

SEQ ID NO: 39133 - DNA, 31 bp, Artificial Sequence; identical to SEQ ID NO: 18674
  Probe

SEQ ID NO: 39134 - DNA, 31 bp, Artificial Sequence; identical to SEQ ID NO: 4817
  Probe

SEQ ID NO: 39135 - DNA, 32 bp, Artificial Sequence; identical to SEQ ID NO: 4818
  Probe

SEQ ID NO: 39136 - DNA, 33 bp, Artificial Sequence; identical to SEQ ID NO: 671
  Probe

SEQ ID NO: 39137 - DNA, 50 bp, Artificial Sequence
  Probe
ccggatagctcagtcggtagagcatcagacttttaatctgagggtccagg

SEQ ID NO: 39138 - DNA, 27 bp, Artificial Sequence
  Probe
ccggctagctcagtcggtagagcatga

SEQ ID NO: 39139 - DNA, 27 bp, Artificial Sequence
  Probe
ccggctagctcagtcggtagagcatgg

SEQ ID NO: 39140 - DNA, 31 bp, Artificial Sequence; identical to SEQ ID NO: 681
  Probe

SEQ ID NO: 39141 - DNA, 29 bp, Artificial Sequence
  Probe
ccggggttcgattccccgacggggaggca

SEQ ID NO: 39142 - DNA, 32 bp, Artificial Sequence
  Probe
ccgggttcgatccccagcatctccagtgtttt

SEQ ID NO: 39143 - DNA, 50 bp, Artificial Sequence; identical to SEQ ID NO: 685
  Probe

SEQ ID NO: 39144 - DNA, 25 bp, Artificial Sequence
  Probe
ccgtagtgtagtggtcatcacgttc

SEQ ID NO: 39145 - DNA, 27 bp, Artificial Sequence
  Probe
ccgtagtgtagtggtcatcacgttcgc

SEQ ID NO: 39146 - DNA, 24 bp, Artificial Sequence
  Probe
ccgtagtgtagtggttatcacgtt

SEQ ID NO: 39147 - DNA, 25 bp, Artificial Sequence
  Probe
ccgtagtgtagtggttatcacgttc

SEQ ID NO: 39148 - DNA, 26 bp, Artificial Sequence
  Probe
ccgtagtgtagtggttatcacgttcg

SEQ ID NO: 39149 - DNA, 27 bp, Artificial Sequence
  Probe
ccgtagtgtagtggttatcacgttcgc

SEQ ID NO: 39150 - DNA, 28 bp, Artificial Sequence
  Probe
ccgtagtgtagtggttatcacgttcgcc

SEQ ID NO: 39151 - DNA, 50 bp, Artificial Sequence; identical to SEQ ID NO: 4842
  Probe

SEQ ID NO: 39152 - DNA, 30 bp, Artificial Sequence; identical to SEQ ID NO: 4843
  Probe

SEQ ID NO: 39153 - DNA, 36 bp, Artificial Sequence; identical to SEQ ID NO: 18750
  Probe

SEQ ID NO: 39154 - DNA, 50 bp, Artificial Sequence; identical to SEQ ID NO: 4847
  Probe

SEQ ID NO: 39155 - DNA, 30 bp, Artificial Sequence
  Probe
ccgtagtgtagtggttattatgttcgcctc

SEQ ID NO: 39156 - DNA, 21 bp, Artificial Sequence
  Probe
ccgtgatcgtatagtggttag

SEQ ID NO: 39157 - DNA, 24 bp, Artificial Sequence
  Probe
ccgtgatcgtatagtggttagtac

SEQ ID NO: 39158 - DNA, 25 bp, Artificial Sequence
  Probe
ccgtgatcgtatagtggttagtact

SEQ ID NO: 39159 - DNA, 26 bp, Artificial Sequence
  Probe
ccgtgatcgtatagtggttagtactc

SEQ ID NO: 39160 - DNA, 27 bp, Artificial Sequence
  Probe
ccgtgatcgtatagtggttagtactct

SEQ ID NO: 39161 - DNA, 28 bp, Artificial Sequence
  Probe
ccgtgatcgtatagtggttagtactctg

SEQ ID NO: 39162 - DNA, 30 bp, Artificial Sequence; identical to SEQ ID NO: 8580
  Probe

SEQ ID NO: 39163 - DNA, 28 bp, Artificial Sequence
  Probe
ccgtggcttagttggttaaagcgcctgt

SEQ ID NO: 39164 - DNA, 20 bp, Artificial Sequence
  Probe
ccgtgtttcccccacgcttt

SEQ ID NO: 39165 - DNA, 21 bp, Artificial Sequence
  Probe
ccgtgtttcccccacgctttt

SEQ ID NO: 39166 - DNA, 50 bp, Artificial Sequence; identical to SEQ ID NO: 4855
  Probe

SEQ ID NO: 39167 - DNA, 22 bp, Artificial Sequence
  Probe
cctaacacgcgaaaggtccccg

SEQ ID NO: 39168 - DNA, 23 bp, Artificial Sequence
  Probe
cctaacacgcgaaaggtccccgg

SEQ ID NO: 39169 - DNA, 24 bp, Artificial Sequence
  Probe
cctaacacgcgaaaggtccccggt

SEQ ID NO: 39170 - DNA, 21 bp, Artificial Sequence
  Probe
cctaagccagggattgtgggt

SEQ ID NO: 39171 - DNA, 17 bp, Artificial Sequence
  Probe
cctattctcaaacttta

SEQ ID NO: 39172 - DNA, 32 bp, Artificial Sequence
  Probe
cctattctcaaactttaaatgggcaagaagcc

SEQ ID NO: 39173 - DNA, 33 bp, Artificial Sequence
  Probe
cctattctcaaactttaaatgggcaagaagccc

SEQ ID NO: 39174 - DNA, 34 bp, Artificial Sequence
  Probe
cctattctcaaactttaaatgggcaagaagccca

SEQ ID NO: 39175 - DNA, 36 bp, Artificial Sequence
  Probe
cctattctcaaactttaaatgggcaagaagcccagc

SEQ ID NO: 39176 - DNA, 38 bp, Artificial Sequence
  Probe
cctattctcaaactttaaatgggcaagaagcccagcta

SEQ ID NO: 39177 - DNA, 50 bp, Artificial Sequence; identical to SEQ ID NO: 691
  Probe

SEQ ID NO: 39178 - DNA, 31 bp, Artificial Sequence
  Probe
cctcaaccgagcgtccaagctctttccattt

SEQ ID NO: 39179 - DNA, 18 bp, Artificial Sequence
  Probe
cctcacacgcgaaaggtc

SEQ ID NO: 39180 - DNA, 41 bp, Artificial Sequence
  Probe
cctcacacgcgaaaggtccccggttcgaaaccgggcggaaa

SEQ ID NO: 39181 - DNA, 42 bp, Artificial Sequence
  Probe
cctcacacgcgaaaggtccccggttcgaaaccgggcggaaac

SEQ ID NO: 39182 - DNA, 46 bp, Artificial Sequence
  Probe
cctcacacgcgaaaggtccccggttcgaaaccgggcggaaacacct

SEQ ID NO: 39183 - DNA, 50 bp, Artificial Sequence
  Probe
cctcacacgcgaaaggtccccggttcgaaaccgggcggaaacacctcctt

SEQ ID NO: 39184 - DNA, 41 bp, Artificial Sequence
  Probe
cctcacacgcgaaaggtccccggttcgatcccgggcggaaa

SEQ ID NO: 39185 - DNA, 42 bp, Artificial Sequence
  Probe
cctcacacgcgaaaggtccccggttcgatcccgggcggaaac

SEQ ID NO: 39186 - DNA, 46 bp, Artificial Sequence
  Probe
cctcacacgcgaaaggtccccggttcgatcccgggcggaaacaggt

SEQ ID NO: 39187 - DNA, 23 bp, Artificial Sequence
  Probe
cctcacacggggcacaataattt

SEQ ID NO: 39188 - DNA, 25 bp, Artificial Sequence
  Probe
cctcacacggggcagtctaacgttt

SEQ ID NO: 39189 - DNA, 23 bp, Artificial Sequence
  Probe
cctcacctggagcaagacccttt

SEQ ID NO: 39190 - DNA, 20 bp, Artificial Sequence
  Probe
cctcagaaggtctcactttt

SEQ ID NO: 39191 - DNA, 24 bp, Artificial Sequence
  Probe
cctcagagggggcagctgccattt

SEQ ID NO: 39192 - DNA, 25 bp, Artificial Sequence
  Probe
cctcagagggggcagctgccatttt

SEQ ID NO: 39193 - DNA, 24 bp, Artificial Sequence
  Probe
cctccagagtcgcatgttgcattt

SEQ ID NO: 39194 - DNA, 41 bp, Artificial Sequence
  Probe
cctcccacgcgggagacccgggttcaattcccggccaatgc

SEQ ID NO: 39195 - DNA, 45 bp, Artificial Sequence
  Probe
cctcccacgcgggagacccgggttcaattcccggccaatgcaaaa

SEQ ID NO: 39196 - DNA, 50 bp, Artificial Sequence
  Probe
cctcccacgcgggagacccgggttcaattcccggccaatgcaaaagggtc

SEQ ID NO: 39197 - DNA, 45 bp, Artificial Sequence
  Probe
cctcccatgcgggagacccgggttcaattcccggccactgcacgt

SEQ ID NO: 39198 - DNA, 46 bp, Artificial Sequence
  Probe
cctccggagctggggattgtgggttcgagtcccatctgggtcgcgt

SEQ ID NO: 39199 - DNA, 31 bp, Artificial Sequence
  Probe
cctcctcgttagtatagtggtgagtatcccc

SEQ ID NO: 39200 - DNA, 22 bp, Artificial Sequence
  Probe
cctcgcagcttcgctgcgtgag

SEQ ID NO: 39201 - DNA, 27 bp, Artificial Sequence
  Probe
cctcgttagtatagtggtgagtatccc

SEQ ID NO: 39202 - DNA, 34 bp, Artificial Sequence; identical to SEQ ID NO: 694
  Probe

SEQ ID NO: 39203 - DNA, 28 bp, Artificial Sequence
  Probe
cctcgttagtatagtggttagtatcccc

SEQ ID NO: 39204 - DNA, 29 bp, Artificial Sequence
  Probe
cctcgttagtatagtggttagtatccccg

SEQ ID NO: 39205 - DNA, 18 bp, Artificial Sequence
  Probe
cctctggcagttctcaag

SEQ ID NO: 39206 - DNA, 27 bp, Artificial Sequence
  Probe
cctctgtgctccggagttacctcgttt

SEQ ID NO: 39207 - DNA, 36 bp, Artificial Sequence
  Probe
cctgagttcgaacctcagagggggcagctgccattt

SEQ ID NO: 39208 - DNA, 18 bp, Artificial Sequence
  Probe
cctgccacgcgggaggcc

SEQ ID NO: 39209 - DNA, 22 bp, Artificial Sequence
  Probe
cctgccacgcgggaggcccggg

SEQ ID NO: 39210 - DNA, 32 bp, Artificial Sequence
  Probe
cctgccacgcgggaggcccgggttcgattccc

SEQ ID NO: 39211 - DNA, 36 bp, Artificial Sequence
  Probe
cctgccacgcgggaggcccgggttcgattcccggcc

SEQ ID NO: 39212 - DNA, 39 bp, Artificial Sequence
  Probe
cctgccacgcgggaggcccgggttcgattcccggccaat

SEQ ID NO: 39213 - DNA, 41 bp, Artificial Sequence
  Probe
cctgccacgcgggaggcccgggttcgattcccggccaatgc

SEQ ID NO: 39214 - DNA, 45 bp, Artificial Sequence
  Probe
cctgccacgcgggaggcccgggttcgattcccggccaatgcaagt

SEQ ID NO: 39215 - DNA, 46 bp, Artificial Sequence
  Probe
cctgccacgcgggaggcccgggttcgattcccggccaatgcaagtt

SEQ ID NO: 39216 - DNA, 50 bp, Artificial Sequence
  Probe
cctgccacgcgggaggcccgggttcgattcccggccaatgcaagttttga

SEQ ID NO: 39217 - DNA, 45 bp, Artificial Sequence
  Probe
cctgccacgcgggaggcccgggttcgattcccggccaatgcacga

SEQ ID NO: 39218 - DNA, 46 bp, Artificial Sequence
  Probe
cctgccacgcgggaggcccgggttcgattcccggccaatgcacgag

SEQ ID NO: 39219 - DNA, 50 bp, Artificial Sequence
  Probe
cctgccacgcgggaggcccgggttcgattcccggccaatgcacgagtaca

SEQ ID NO: 39220 - DNA, 45 bp, Artificial Sequence
  Probe
cctgccacgcgggaggcccgggttcgattcccggccaatgcactt

SEQ ID NO: 39221 - DNA, 46 bp, Artificial Sequence
  Probe
cctgccacgcgggaggcccgggttcgattcccggccaatgcacttt

SEQ ID NO: 39222 - DNA, 50 bp, Artificial Sequence
  Probe
cctgccacgcgggaggcccgggttcgattcccggccaatgcactttcatt

SEQ ID NO: 39223 - DNA, 45 bp, Artificial Sequence
  Probe
cctgccacgcgggaggcccgggttcgattcccggccaatgcagca

SEQ ID NO: 39224 - DNA, 50 bp, Artificial Sequence
  Probe
cctgccacgcgggaggcccgggttcgattcccggccaatgcagcagcaga

SEQ ID NO: 39225 - DNA, 50 bp, Artificial Sequence
  Probe
cctgccacgcgggaggcccgggttcgattcccggccaatgcagcagctga

SEQ ID NO: 39226 - DNA, 39 bp, Artificial Sequence
  Probe
cctgccacgcgggaggcccgggttcgattcccggcccat

SEQ ID NO: 39227 - DNA, 42 bp, Artificial Sequence
  Probe
cctgccacgcgggaggcccgggttcgattcccggcccatgca

SEQ ID NO: 39228 - DNA, 45 bp, Artificial Sequence
  Probe
cctgccacgcgggaggcccgggttcgattcccggcccatgcagca

SEQ ID NO: 39229 - DNA, 50 bp, Artificial Sequence
  Probe
cctgccacgcgggaggcccgggttcgattcccggcccatgcagcacgaaa

SEQ ID NO: 39230 - DNA, 50 bp, Artificial Sequence
  Probe
cctgccacgcgggaggcccgggttcgattcccggcccatgcagcacgccc

SEQ ID NO: 39231 - DNA, 25 bp, Artificial Sequence
  Probe
cctggctggctcgcgatgtctgttt

SEQ ID NO: 39232 - DNA, 29 bp, Artificial Sequence
  Probe
cctggctggctcgcttgtgctctcacttt

SEQ ID NO: 39233 - DNA, 26 bp, Artificial Sequence
  Probe
cctggtggtctagtggctaggattcg

SEQ ID NO: 39234 - DNA, 27 bp, Artificial Sequence
  Probe
cctggtggtctagtggctaggattcgg

SEQ ID NO: 39235 - DNA, 24 bp, Artificial Sequence
  Probe
cctggtggtctagtggttaggatt

SEQ ID NO: 39236 - DNA, 26 bp, Artificial Sequence
  Probe
cctggtggtctagtggttaggattcg

SEQ ID NO: 39237 - DNA, 27 bp, Artificial Sequence
  Probe
cctggtggtctagtggttaggattcgg

SEQ ID NO: 39238 - DNA, 50 bp, Artificial Sequence
  Probe
cctggttttcacccaggcggcccgggttcgactcccggtgtgggaacgcc

SEQ ID NO: 39239 - DNA, 18 bp, Artificial Sequence
  Probe
cctgtcacgcgggagacc

SEQ ID NO: 39240 - DNA, 25 bp, Artificial Sequence
  Probe
cctgtcacgcgggagaccggggttc

SEQ ID NO: 39241 - DNA, 35 bp, Artificial Sequence
  Probe
cctgtcacgcgggagaccggggttcaattccccga

SEQ ID NO: 39242 - DNA, 36 bp, Artificial Sequence
  Probe
cctgtcacgcgggagaccggggttcaattccccgac

SEQ ID NO: 39243 - DNA, 43 bp, Artificial Sequence
  Probe
cctgtcacgcgggagaccggggttcaattccccgacggggagg

SEQ ID NO: 39244 - DNA, 45 bp, Artificial Sequence; identical to SEQ ID NO: 4880
  Probe

SEQ ID NO: 39245 - DNA, 50 bp, Artificial Sequence; identical to SEQ ID NO: 4881
  Probe

SEQ ID NO: 39246 - DNA, 27 bp, Artificial Sequence
  Probe
cctgtcacgcgggagaccggggttcga

SEQ ID NO: 39247 - DNA, 29 bp, Artificial Sequence
  Probe
cctgtcacgcgggagaccggggttcgatt

SEQ ID NO: 39248 - DNA, 33 bp, Artificial Sequence
  Probe
cctgtcacgcgggagaccggggttcgattcccc

SEQ ID NO: 39249 - DNA, 34 bp, Artificial Sequence
  Probe
cctgtcacgcgggagaccggggttcgattcccca

SEQ ID NO: 39250 - DNA, 35 bp, Artificial Sequence
  Probe
cctgtcacgcgggagaccggggttcgattccccaa

SEQ ID NO: 39251 - DNA, 41 bp, Artificial Sequence
  Probe
cctgtcacgcgggagaccggggttcgattccccaacgggga

SEQ ID NO: 39252 - DNA, 42 bp, Artificial Sequence
  Probe
cctgtcacgcgggagaccggggttcgattccccaacggggag

SEQ ID NO: 39253 - DNA, 45 bp, Artificial Sequence
  Probe
cctgtcacgcgggagaccggggttcgattccccaacggggaggct

SEQ ID NO: 39254 - DNA, 50 bp, Artificial Sequence
  Probe
cctgtcacgcgggagaccggggttcgattccccaacggggaggctaataa

SEQ ID NO: 39255 - DNA, 34 bp, Artificial Sequence
  Probe
cctgtcacgcgggagaccggggttcgattccccg

SEQ ID NO: 39256 - DNA, 37 bp, Artificial Sequence
  Probe
cctgtcacgcgggagaccggggttcgattccccgacg

SEQ ID NO: 39257 - DNA, 43 bp, Artificial Sequence; identical to SEQ ID NO: 18830
  Probe

SEQ ID NO: 39258 - DNA, 45 bp, Artificial Sequence; identical to SEQ ID NO: 4883
  Probe

SEQ ID NO: 39259 - DNA, 46 bp, Artificial Sequence
  Probe
cctgtcacgcgggagaccggggttcgattccccgacggggagaaaa

SEQ ID NO: 39260 - DNA, 50 bp, Artificial Sequence; identical to SEQ ID NO: 18832
  Probe

SEQ ID NO: 39261 - DNA, 45 bp, Artificial Sequence; identical to SEQ ID NO: 4885
  Probe

SEQ ID NO: 39262 - DNA, 46 bp, Artificial Sequence
  Probe
cctgtcacgcgggagaccggggttcgattccccgacggggagagta

SEQ ID NO: 39263 - DNA, 50 bp, Artificial Sequence
  Probe
cctgtcacgcgggagaccggggttcgattccccgacggggagagtactag

SEQ ID NO: 39264 - DNA, 43 bp, Artificial Sequence; identical to SEQ ID NO: 18834
  Probe

SEQ ID NO: 39265 - DNA, 45 bp, Artificial Sequence
  Probe
cctgtcacgcgggagaccggggttcgattccccgacggggaggag

SEQ ID NO: 39266 - DNA, 46 bp, Artificial Sequence
  Probe
cctgtcacgcgggagaccggggttcgattccccgacggggaggagg

SEQ ID NO: 39267 - DNA, 50 bp, Artificial Sequence
  Probe
cctgtcacgcgggagaccggggttcgattccccgacggggaggaggctta

SEQ ID NO: 39268 - DNA, 45 bp, Artificial Sequence; identical to SEQ ID NO: 4886
  Probe

SEQ ID NO: 39269 - DNA, 46 bp, Artificial Sequence
  Probe
cctgtcacgcgggagaccggggttcgattccccgacggggaggcac

SEQ ID NO: 39270 - DNA, 50 bp, Artificial Sequence; identical to SEQ ID NO: 4889
  Probe

SEQ ID NO: 39271 - DNA, 46 bp, Artificial Sequence
  Probe
cctgtcacgcgggagaccggggttcgattccccgacggggaggcag

SEQ ID NO: 39272 - DNA, 50 bp, Artificial Sequence; identical to SEQ ID NO: 18839
  Probe

SEQ ID NO: 39273 - DNA, 45 bp, Artificial Sequence; identical to SEQ ID NO: 4890
  Probe

SEQ ID NO: 39274 - DNA, 46 bp, Artificial Sequence
  Probe
cctgtcacgcgggagaccggggttcgattccccgacggggaggcca

SEQ ID NO: 39275 - DNA, 50 bp, Artificial Sequence; identical to SEQ ID NO: 18841
  Probe

SEQ ID NO: 39276 - DNA, 46 bp, Artificial Sequence
  Probe
cctgtcacgcgggagaccggggttcgattccccgacggggaggccg

SEQ ID NO: 39277 - DNA, 50 bp, Artificial Sequence; identical to SEQ ID NO: 4891
  Probe

SEQ ID NO: 39278 - DNA, 17 bp, Artificial Sequence
  Probe
cctgttggcttactttt

SEQ ID NO: 39279 - DNA, 18 bp, Artificial Sequence
  Probe
ccttccaagcagttgacc

SEQ ID NO: 39280 - DNA, 25 bp, Artificial Sequence
  Probe
ccttccaagcagttgacccgggttc

SEQ ID NO: 39281 - DNA, 32 bp, Artificial Sequence
  Probe
ccttccaagcagttgacccgggttcgattccc

SEQ ID NO: 39282 - DNA, 33 bp, Artificial Sequence
  Probe
ccttccaagcagttgacccgggttcgattcccg

SEQ ID NO: 39283 - DNA, 34 bp, Artificial Sequence
  Probe
ccttccaagcagttgacccgggttcgattcccgg

SEQ ID NO: 39284 - DNA, 36 bp, Artificial Sequence
  Probe
ccttccaagcagttgacccgggttcgattcccggcc

SEQ ID NO: 39285 - DNA, 37 bp, Artificial Sequence
  Probe
ccttccaagcagttgacccgggttcgattcccggcca

SEQ ID NO: 39286 - DNA, 38 bp, Artificial Sequence
  Probe
ccttccaagcagttgacccgggttcgattcccggccaa

SEQ ID NO: 39287 - DNA, 49 bp, Artificial Sequence
  Probe
ccttccaagcagttgacccgggttcgattcccggccaacgcaagggttt

SEQ ID NO: 39288 - DNA, 50 bp, Artificial Sequence
  Probe
ccttccaagcagttgacccgggttcgattcccggccaacgcaagggtttt

SEQ ID NO: 39289 - DNA, 45 bp, Artificial Sequence
  Probe
ccttccaagcagttgacccgggttcgattcccggccaacgcaagt

SEQ ID NO: 39290 - DNA, 49 bp, Artificial Sequence
  Probe
ccttccaagcagttgacccgggttcgattcccggccaacgcaagtcgtt

SEQ ID NO: 39291 - DNA, 50 bp, Artificial Sequence
  Probe
ccttccaagcagttgacccgggttcgattcccggccaacgcaagtcgttt

SEQ ID NO: 39292 - DNA, 45 bp, Artificial Sequence
  Probe
ccttccaagcagttgacccgggttcgattcccggccaacgcagcg

SEQ ID NO: 39293 - DNA, 50 bp, Artificial Sequence
  Probe
ccttccaagcagttgacccgggttcgattcccggccaacgcagcgggcgg

SEQ ID NO: 39294 - DNA, 45 bp, Artificial Sequence
  Probe
ccttccaagcagttgacccgggttcgattcccggccaacgcagtg

SEQ ID NO: 39295 - DNA, 50 bp, Artificial Sequence
  Probe
ccttccaagcagttgacccgggttcgattcccggccaacgcagtgtcagt

SEQ ID NO: 39296 - DNA, 45 bp, Artificial Sequence
  Probe
ccttccaagcagttgacccgggttcgattcccggccaacgcatgc

SEQ ID NO: 39297 - DNA, 50 bp, Artificial Sequence
  Probe
ccttccaagcagttgacccgggttcgattcccggccaacgcatgcggtac

SEQ ID NO: 39298 - DNA, 25 bp, Artificial Sequence
  Probe
ccttcctgtcccgtacggtttttct

SEQ ID NO: 39299 - DNA, 25 bp, Artificial Sequence
  Probe
ccttcgttggctctgcctgccaact

SEQ ID NO: 39300 - DNA, 28 bp, Artificial Sequence
  Probe
ccttggtggtctagtggctaggattcgg

SEQ ID NO: 39301 - DNA, 21 bp, Artificial Sequence
  Probe
cctttcaagcagttaacgcgg

SEQ ID NO: 39302 - DNA, 23 bp, Artificial Sequence
  Probe
cctttcaagcagttaacgcgggt

SEQ ID NO: 39303 - DNA, 29 bp, Artificial Sequence
  Probe
cctttcaagcagttaacgcgggttcgatt

SEQ ID NO: 39304 - DNA, 34 bp, Artificial Sequence
  Probe
cctttcaagcagttaacgcgggttcgattcccgg

SEQ ID NO: 39305 - DNA, 50 bp, Artificial Sequence
  Probe
cctttcaagcagttaacgcgggttcgattcccgggtaacgaaacgttttt

SEQ ID NO: 39306 - DNA, 50 bp, Artificial Sequence; identical to SEQ ID NO: 4905
  Probe

SEQ ID NO: 39307 - DNA, 24 bp, Artificial Sequence
  Probe
ccttttttcccggcggcgggagaa

SEQ ID NO: 39308 - DNA, 28 bp, Artificial Sequence
  Probe
cgaaaccatcctctgctatcggagtttt

SEQ ID NO: 39309 - DNA, 29 bp, Artificial Sequence
  Probe
cgaaaccatcctctgctatcggagttttt

SEQ ID NO: 39310 - DNA, 30 bp, Artificial Sequence
  Probe
cgaaaccatcctctgctatcggagtttttt

SEQ ID NO: 39311 - DNA, 18 bp, Artificial Sequence
  Probe
cgaaaggtccccggttcg

SEQ ID NO: 39312 - DNA, 31 bp, Artificial Sequence
  Probe
cgaaaggtccccggttcgaaaccgggcggaa

SEQ ID NO: 39313 - DNA, 28 bp, Artificial Sequence
  Probe
cgaacctcagagggggcagctgccattt

SEQ ID NO: 39314 - DNA, 28 bp, Artificial Sequence
  Probe
cgaagaagcagcttcaaacctgccgggg

SEQ ID NO: 39315 - DNA, 30 bp, Artificial Sequence; identical to SEQ ID NO: 4930
  Probe

SEQ ID NO: 39316 - DNA, 34 bp, Artificial Sequence; identical to SEQ ID NO: 4934
  Probe

SEQ ID NO: 39317 - DNA, 21 bp, Artificial Sequence
  Probe
cgaatcccagcggtgcctccg

SEQ ID NO: 39318 - DNA, 35 bp, Artificial Sequence
  Probe
cgaatcccatcctcgtcgatgtggtggcttacttt

SEQ ID NO: 39319 - DNA, 37 bp, Artificial Sequence; identical to SEQ ID NO: 4944
  Probe

SEQ ID NO: 39320 - DNA, 30 bp, Artificial Sequence; identical to SEQ ID NO: 18938
  Probe

SEQ ID NO: 39321 - DNA, 32 bp, Artificial Sequence; identical to SEQ ID NO: 18941
  Probe

SEQ ID NO: 39322 - DNA, 33 bp, Artificial Sequence
  Probe
cgagaggtcccgggttcaaatcccggacgagcc

SEQ ID NO: 39323 - DNA, 37 bp, Artificial Sequence
  Probe
cgagccccagtggaaccacggcgtgattcataccttt

SEQ ID NO: 39324 - DNA, 29 bp, Artificial Sequence
  Probe
cgagcctcacacggggcagtctaacgttt

SEQ ID NO: 39325 - DNA, 23 bp, Artificial Sequence
  Probe
cgaggtccctggttcaatccctg

SEQ ID NO: 39326 - DNA, 18 bp, Artificial Sequence
  Probe
cgagtcccttcgtggtcg

SEQ ID NO: 39327 - DNA, 24 bp, Artificial Sequence
  Probe
cgagtcccttcgtggtcgtcgttt

SEQ ID NO: 39328 - DNA, 21 bp, Artificial Sequence
  Probe
cgagtggtctaaggcgccaga

SEQ ID NO: 39329 - DNA, 21 bp, Artificial Sequence
  Probe
cgatccccagtacctccaggc

SEQ ID NO: 39330 - DNA, 21 bp, Artificial Sequence
  Probe
cgatccccggcatctccattg

SEQ ID NO: 39331 - DNA, 27 bp, Artificial Sequence
  Probe
cgatccgagttcaaatctcggtggaac

SEQ ID NO: 39332 - DNA, 28 bp, Artificial Sequence
  Probe
cgatccgagttcaaatctcggtggaacc

SEQ ID NO: 39333 - DNA, 32 bp, Artificial Sequence; identical to SEQ ID NO: 4954
  Probe

SEQ ID NO: 39334 - DNA, 32 bp, Artificial Sequence
  Probe
cgatccgagttcaaatctcggtgggacctcac

SEQ ID NO: 39335 - DNA, 28 bp, Artificial Sequence
  Probe
cgatccgagttcaagtctcggtggaacc

SEQ ID NO: 39336 - DNA, 21 bp, Artificial Sequence
  Probe
cgattccccgacggggaggca

SEQ ID NO: 39337 - DNA, 21 bp, Artificial Sequence
  Probe
cgattcccggtcagggaacaa

SEQ ID NO: 39338 - DNA, 21 bp, Artificial Sequence
  Probe
cgattcccggtcatggaacca

SEQ ID NO: 39339 - DNA, 21 bp, Artificial Sequence
  Probe
cgattcctggtcagggaacca

SEQ ID NO: 39340 - DNA, 26 bp, Artificial Sequence
  Probe
cgcagaaggtcctgggttcgagcccc

SEQ ID NO: 39341 - DNA, 32 bp, Artificial Sequence; identical to SEQ ID NO: 4969
  Probe

SEQ ID NO: 39342 - DNA, 37 bp, Artificial Sequence; identical to SEQ ID NO: 4972
  Probe

SEQ ID NO: 39343 - DNA, 37 bp, Artificial Sequence; identical to SEQ ID NO: 4973
  Probe

SEQ ID NO: 39344 - DNA, 50 bp, Artificial Sequence
  Probe
cgcatgcttcgcatgtacgaggtccctggttcaatccctggtacctccat

SEQ ID NO: 39345 - DNA, 30 bp, Artificial Sequence
  Probe
cgcattggtggttcagtggtagaattctcg

SEQ ID NO: 39346 - DNA, 32 bp, Artificial Sequence
  Probe
cgcccggctagctcagtcggtagagcatggga

SEQ ID NO: 39347 - DNA, 31 bp, Artificial Sequence; identical to SEQ ID NO: 19061
  Probe

SEQ ID NO: 39348 - DNA, 34 bp, Artificial Sequence; identical to SEQ ID NO: 19062
  Probe

SEQ ID NO: 39349 - DNA, 37 bp, Artificial Sequence; identical to SEQ ID NO: 4990
  Probe

SEQ ID NO: 39350 - DNA, 27 bp, Artificial Sequence
  Probe
cgccgctggtgtagtggtatcatgcaa

SEQ ID NO: 39351 - DNA, 30 bp, Artificial Sequence; identical to SEQ ID NO: 9798
  Probe

SEQ ID NO: 39352 - DNA, 31 bp, Artificial Sequence; identical to SEQ ID NO: 19077
  Probe

SEQ ID NO: 39353 - DNA, 32 bp, Artificial Sequence; identical to SEQ ID NO: 4998
  Probe

SEQ ID NO: 39354 - DNA, 35 bp, Artificial Sequence; identical to SEQ ID NO: 5001
  Probe

SEQ ID NO: 39355 - DNA, 36 bp, Artificial Sequence; identical to SEQ ID NO: 5002
  Probe

SEQ ID NO: 39356 - DNA, 27 bp, Artificial Sequence
  Probe
cgcctgtcacgcgggagaccggggttc

SEQ ID NO: 39357 - DNA, 50 bp, Artificial Sequence; identical to SEQ ID NO: 5005
  Probe

SEQ ID NO: 39358 - DNA, 44 bp, Artificial Sequence; identical to SEQ ID NO: 5006
  Probe

SEQ ID NO: 39359 - DNA, 50 bp, Artificial Sequence; identical to SEQ ID NO: 5007
  Probe

SEQ ID NO: 39360 - DNA, 33 bp, Artificial Sequence; identical to SEQ ID NO: 13125
  Probe

SEQ ID NO: 39361 - DNA, 33 bp, Artificial Sequence; identical to SEQ ID NO: 19126
  Probe

SEQ ID NO: 39362 - DNA, 23 bp, Artificial Sequence
  Probe
cgcgcaggttcaaatcctgctca

SEQ ID NO: 39363 - DNA, 24 bp, Artificial Sequence
  Probe
cgcgcaggttcaaatcctgctcac

SEQ ID NO: 39364 - DNA, 25 bp, Artificial Sequence
  Probe
cgcgcaggttcaaatcctgctcaca

SEQ ID NO: 39365 - DNA, 26 bp, Artificial Sequence
  Probe
cgcgcaggttcaaatcctgctcacag

SEQ ID NO: 39366 - DNA, 32 bp, Artificial Sequence
  Probe
cgcgcattggtggttcagtggtagaattctcg

SEQ ID NO: 39367 - DNA, 35 bp, Artificial Sequence; identical to SEQ ID NO: 30388
  Probe

SEQ ID NO: 39368 - DNA, 28 bp, Artificial Sequence
  Probe
cgcggcccgggttcgattcccggtcagg

SEQ ID NO: 39369 - DNA, 31 bp, Artificial Sequence; identical to SEQ ID NO: 19132
  Probe

SEQ ID NO: 39370 - DNA, 34 bp, Artificial Sequence; identical to SEQ ID NO: 5022
  Probe

SEQ ID NO: 39371 - DNA, 32 bp, Artificial Sequence; identical to SEQ ID NO: 19140
  Probe

SEQ ID NO: 39372 - DNA, 33 bp, Artificial Sequence
  Probe
cgcgggagacccgggttcaattcccggccaatg

SEQ ID NO: 39373 - DNA, 34 bp, Artificial Sequence
  Probe
cgcgggagacccgggttcaattcccggccaatgc

SEQ ID NO: 39374 - DNA, 28 bp, Artificial Sequence
  Probe
cgcgggagaccggggttcaattccccga

SEQ ID NO: 39375 - DNA, 29 bp, Artificial Sequence
  Probe
cgcgggagaccggggttcaattccccgac

SEQ ID NO: 39376 - DNA, 31 bp, Artificial Sequence; identical to SEQ ID NO: 5024
  Probe

SEQ ID NO: 39377 - DNA, 36 bp, Artificial Sequence; identical to SEQ ID NO: 5025
  Probe

SEQ ID NO: 39378 - DNA, 38 bp, Artificial Sequence; identical to SEQ ID NO: 5026
  Probe

SEQ ID NO: 39379 - DNA, 22 bp, Artificial Sequence
  Probe
cgcgggagaccggggttcgatt

SEQ ID NO: 39380 - DNA, 26 bp, Artificial Sequence
  Probe
cgcgggagaccggggttcgattcccc

SEQ ID NO: 39381 - DNA, 27 bp, Artificial Sequence
  Probe
cgcgggagaccggggttcgattcccca

SEQ ID NO: 39382 - DNA, 28 bp, Artificial Sequence
  Probe
cgcgggagaccggggttcgattccccaa

SEQ ID NO: 39383 - DNA, 32 bp, Artificial Sequence; identical to SEQ ID NO: 13137
  Probe

SEQ ID NO: 39384 - DNA, 33 bp, Artificial Sequence; identical to SEQ ID NO: 19149
  Probe

SEQ ID NO: 39385 - DNA, 35 bp, Artificial Sequence; identical to SEQ ID NO: 19150
  Probe

SEQ ID NO: 39386 - DNA, 27 bp, Artificial Sequence
  Probe
cgcgggagaccggggttcgattccccg

SEQ ID NO: 39387 - DNA, 36 bp, Artificial Sequence; identical to SEQ ID NO: 5028
  Probe

SEQ ID NO: 39388 - DNA, 45 bp, Artificial Sequence
  Probe
cgcgggagaccggggttcgattccccgacggggagaaaagttgct

SEQ ID NO: 39389 - DNA, 36 bp, Artificial Sequence; identical to SEQ ID NO: 5034
  Probe

SEQ ID NO: 39390 - DNA, 38 bp, Artificial Sequence; identical to SEQ ID NO: 19162
  Probe

SEQ ID NO: 39391 - DNA, 45 bp, Artificial Sequence
  Probe
cgcgggagaccggggttcgattccccgacggggaggaggcttaaa

SEQ ID NO: 39392 - DNA, 50 bp, Artificial Sequence
  Probe
cgcgggagaccggggttcgattccccgacggggaggaggcttaaactttt

SEQ ID NO: 39393 - DNA, 38 bp, Artificial Sequence; identical to SEQ ID NO: 5037
  Probe

SEQ ID NO: 39394 - DNA, 41 bp, Artificial Sequence; identical to SEQ ID NO: 19169
  Probe

SEQ ID NO: 39395 - DNA, 50 bp, Artificial Sequence
  Probe
cgcgggagaccggggttcgattccccgacggggaggccgggtactttcgt

SEQ ID NO: 39396 - DNA, 32 bp, Artificial Sequence; identical to SEQ ID NO: 19170
  Probe

SEQ ID NO: 39397 - DNA, 35 bp, Artificial Sequence; identical to SEQ ID NO: 13149
  Probe

SEQ ID NO: 39398 - DNA, 35 bp, Artificial Sequence; identical to SEQ ID NO: 13150
  Probe

SEQ ID NO: 39399 - DNA, 34 bp, Artificial Sequence
  Probe
cgcggtggggattctggtctccaatggaggcgtg

SEQ ID NO: 39400 - DNA, 50 bp, Artificial Sequence
  Probe
cgcggtggggattctggtctccaatggaggcgtgggttcgaatcccactt

SEQ ID NO: 39401 - DNA, 50 bp, Artificial Sequence
  Probe
cgcgtcagtctcataatctgaaggtcctgagttcgaacctcagagggggc

SEQ ID NO: 39402 - DNA, 25 bp, Artificial Sequence
  Probe
cgcgtgggttcgaatcccatcctcg

SEQ ID NO: 39403 - DNA, 26 bp, Artificial Sequence
  Probe
cgcgtgggttcgaatcccatcctcgt

SEQ ID NO: 39404 - DNA, 27 bp, Artificial Sequence
  Probe
cgcgtgggttcgaatcccatcctcgtc

SEQ ID NO: 39405 - DNA, 30 bp, Artificial Sequence
  Probe
cgcgttggtggtatagtggtgagcatagct

SEQ ID NO: 39406 - DNA, 31 bp, Artificial Sequence
  Probe
cgcgttggtggtatagtggtgagcatagctg

SEQ ID NO: 39407 - DNA, 50 bp, Artificial Sequence
  Probe
cgctctcaccgccgcggcccgggttcgattcccggtcaggaaagtaagcc

SEQ ID NO: 39408 - DNA, 41 bp, Artificial Sequence
  Probe
cgctctcaccgccgcggcccgggttcgattcccggtcaggg

SEQ ID NO: 39409 - DNA, 43 bp, Artificial Sequence
  Probe
cgctctcaccgccgcggcccgggttcgattcccggtcagggaa

SEQ ID NO: 39410 - DNA, 44 bp, Artificial Sequence
  Probe
cgctctcaccgccgcggcccgggttcgattcccggtcagggaaa

SEQ ID NO: 39411 - DNA, 46 bp, Artificial Sequence; identical to SEQ ID NO: 30418
  Probe

SEQ ID NO: 39412 - DNA, 50 bp, Artificial Sequence
  Probe
cgctctcaccgccgcggcccgggttcgattcccggtcagggaaagagtaa

SEQ ID NO: 39413 - DNA, 44 bp, Artificial Sequence
  Probe
cgctctcaccgccgcggcccgggttcgattcccggtcagggaag

SEQ ID NO: 39414 - DNA, 45 bp, Artificial Sequence
  Probe
cgctctcaccgccgcggcccgggttcgattcccggtcagggaagc

SEQ ID NO: 39415 - DNA, 46 bp, Artificial Sequence; identical to SEQ ID NO: 19193
  Probe

SEQ ID NO: 39416 - DNA, 50 bp, Artificial Sequence
  Probe
cgctctcaccgccgcggcccgggttcgattcccggtcagggaagccttcc

SEQ ID NO: 39417 - DNA, 46 bp, Artificial Sequence; identical to SEQ ID NO: 19194
  Probe

SEQ ID NO: 39418 - DNA, 49 bp, Artificial Sequence
  Probe
cgctctcaccgccgcggcccgggttcgattcccggtcagggaagtcttg

SEQ ID NO: 39419 - DNA, 50 bp, Artificial Sequence
  Probe
cgctctcaccgccgcggcccgggttcgattcccggtcagggaagtcttgt

SEQ ID NO: 39420 - DNA, 44 bp, Artificial Sequence
  Probe
cgctctcaccgccgcggcccgggttcgattcccggtcagggaat

SEQ ID NO: 39421 - DNA, 46 bp, Artificial Sequence; identical to SEQ ID NO: 30420
  Probe

SEQ ID NO: 39422 - DNA, 49 bp, Artificial Sequence
  Probe
cgctctcaccgccgcggcccgggttcgattcccggtcagggaatgaggt

SEQ ID NO: 39423 - DNA, 50 bp, Artificial Sequence
  Probe
cgctctcaccgccgcggcccgggttcgattcccggtcagggaatgaggtt

SEQ ID NO: 39424 - DNA, 29 bp, Artificial Sequence
  Probe
cgctgccacacctcagaaggtctcacttt

SEQ ID NO: 39425 - DNA, 30 bp, Artificial Sequence; identical to SEQ ID NO: 19196
  Probe

SEQ ID NO: 39426 - DNA, 42 bp, Artificial Sequence
  Probe
cgctttcaccgccgcggcccgggttcgattcccggtcaggga

SEQ ID NO: 39427 - DNA, 49 bp, Artificial Sequence
  Probe
cgctttcaccgccgcggcccgggttcgattcccggtcagggaagtttgc

SEQ ID NO: 39428 - DNA, 50 bp, Artificial Sequence
  Probe
cgctttcaccgccgcggcccgggttcgattcccggtcagggaagtttgct

SEQ ID NO: 39429 - DNA, 46 bp, Artificial Sequence
  Probe
cgctttcaccgccgcggcccgggttcgattcccggtcagggaattg

SEQ ID NO: 39430 - DNA, 50 bp, Artificial Sequence
  Probe
cgctttcaccgccgcggcccgggttcgattcccggtcagggaattgtttt

SEQ ID NO: 39431 - DNA, 25 bp, Artificial Sequence
  Probe
cggaaacacactaaaaaatcccttt

SEQ ID NO: 39432 - DNA, 26 bp, Artificial Sequence
  Probe
cggaaacacactaaaaaatccctttt

SEQ ID NO: 39433 - DNA, 19 bp, Artificial Sequence
  Probe
cggaagcgggtgctcttat

SEQ ID NO: 39434 - DNA, 20 bp, Artificial Sequence
  Probe
cggaagcgggtgctcttatt

SEQ ID NO: 39435 - DNA, 21 bp, Artificial Sequence
  Probe
cggaagcgggtgctcttattt

SEQ ID NO: 39436 - DNA, 22 bp, Artificial Sequence
  Probe
cggaagcgggtgctcttatttt

SEQ ID NO: 39437 - DNA, 18 bp, Artificial Sequence
  Probe
cggaagcgtgctgggccc

SEQ ID NO: 39438 - DNA, 35 bp, Artificial Sequence; identical to SEQ ID NO: 748
  Probe

SEQ ID NO: 39439 - DNA, 36 bp, Artificial Sequence; identical to SEQ ID NO: 749
  Probe

SEQ ID NO: 39440 - DNA, 38 bp, Artificial Sequence; identical to SEQ ID NO: 751
  Probe

SEQ ID NO: 39441 - DNA, 30 bp, Artificial Sequence; identical to SEQ ID NO: 5060
  Probe

SEQ ID NO: 39442 - DNA, 31 bp, Artificial Sequence; identical to SEQ ID NO: 5061
  Probe

SEQ ID NO: 39443 - DNA, 18 bp, Artificial Sequence
  Probe
cggagctggggattgtgg

SEQ ID NO: 39444 - DNA, 27 bp, Artificial Sequence
  Probe
cggatagctcagtcggtagagcatcag

SEQ ID NO: 39445 - DNA, 29 bp, Artificial Sequence
  Probe
cggatagctcagtcggtagagcatcagac

SEQ ID NO: 39446 - DNA, 32 bp, Artificial Sequence; identical to SEQ ID NO: 764
  Probe

SEQ ID NO: 39447 - DNA, 34 bp, Artificial Sequence; identical to SEQ ID NO: 13180
  Probe

SEQ ID NO: 39448 - DNA, 18 bp, Artificial Sequence
  Probe
cggatcagaagattgagg

SEQ ID NO: 39449 - DNA, 35 bp, Artificial Sequence
  Probe
cggatcagaagattgagggttcgagtcccttcgtg

SEQ ID NO: 39450 - DNA, 18 bp, Artificial Sequence
  Probe
cggatcagaagattgcag

SEQ ID NO: 39451 - DNA, 33 bp, Artificial Sequence
  Probe
cggatggaggcgtgggttcgaatcccacttctg

SEQ ID NO: 39452 - DNA, 34 bp, Artificial Sequence
  Probe
cggatggaggcgtgggttcgaatcccacttctga

SEQ ID NO: 39453 - DNA, 35 bp, Artificial Sequence
  Probe
cggatggaggcgtgggttcgaatcccacttctgac

SEQ ID NO: 39454 - DNA, 23 bp, Artificial Sequence
  Probe
cggcccgggttcgactcccggtg

SEQ ID NO: 39455 - DNA, 26 bp, Artificial Sequence
  Probe
cggcccgggttcgactcccggtgtgg

SEQ ID NO: 39456 - DNA, 27 bp, Artificial Sequence
  Probe
cggcccgggttcgactcccggtgtggg

SEQ ID NO: 39457 - DNA, 22 bp, Artificial Sequence
  Probe
cggcccgggttcgattcccggt

SEQ ID NO: 39458 - DNA, 23 bp, Artificial Sequence
  Probe
cggcccgggttcgattcccggtc

SEQ ID NO: 39459 - DNA, 26 bp, Artificial Sequence
  Probe
cggcccgggttcgattcccggtcagg

SEQ ID NO: 39460 - DNA, 27 bp, Artificial Sequence
  Probe
cggcccgggttcgattcccggtcaggg

SEQ ID NO: 39461 - DNA, 29 bp, Artificial Sequence
  Probe
cggcccgggttcgattcccggtcagggaa

SEQ ID NO: 39462 - DNA, 37 bp, Artificial Sequence
  Probe
cggcccgggttcgattcccggtcagggaatgaggttt

SEQ ID NO: 39463 - DNA, 38 bp, Artificial Sequence
  Probe
cggcccgggttcgattcccggtcagggaatgaggtttt

SEQ ID NO: 39464 - DNA, 32 bp, Artificial Sequence; identical to SEQ ID NO: 5074
  Probe

SEQ ID NO: 39465 - DNA, 26 bp, Artificial Sequence
  Probe
cggctagctcagtcggtagagcatga

SEQ ID NO: 39466 - DNA, 27 bp, Artificial Sequence
  Probe
cggctagctcagtcggtagagcatgag

SEQ ID NO: 39467 - DNA, 30 bp, Artificial Sequence; identical to SEQ ID NO: 771
  Probe

SEQ ID NO: 39468 - DNA, 31 bp, Artificial Sequence; identical to SEQ ID NO: 772
  Probe

SEQ ID NO: 39469 - DNA, 27 bp, Artificial Sequence
  Probe
cggctagctcagtcggtagagcatggg

SEQ ID NO: 39470 - DNA, 31 bp, Artificial Sequence; identical to SEQ ID NO: 779
  Probe

SEQ ID NO: 39471 - DNA, 31 bp, Artificial Sequence
  Probe
cgggagacccgggttcaattcccggccaatg

SEQ ID NO: 39472 - DNA, 32 bp, Artificial Sequence
  Probe
cgggagacccgggttcaattcccggccaatgc

SEQ ID NO: 39473 - DNA, 34 bp, Artificial Sequence; identical to SEQ ID NO: 19251
  Probe

SEQ ID NO: 39474 - DNA, 36 bp, Artificial Sequence; identical to SEQ ID NO: 5077
  Probe

SEQ ID NO: 39475 - DNA, 31 bp, Artificial Sequence
  Probe
cgggagaccggggttcgattccccaacgggg

SEQ ID NO: 39476 - DNA, 33 bp, Artificial Sequence
  Probe
cgggagaccggggttcgattccccaacggggag

SEQ ID NO: 39477 - DNA, 26 bp, Artificial Sequence
  Probe
cgggagaccggggttcgattccccga

SEQ ID NO: 39478 - DNA, 34 bp, Artificial Sequence; identical to SEQ ID NO: 5079
  Probe

SEQ ID NO: 39479 - DNA, 34 bp, Artificial Sequence; identical to SEQ ID NO: 5082
  Probe

SEQ ID NO: 39480 - DNA, 36 bp, Artificial Sequence; identical to SEQ ID NO: 5084
  Probe

SEQ ID NO: 39481 - DNA, 42 bp, Artificial Sequence; identical to SEQ ID NO: 19280
  Probe

SEQ ID NO: 39482 - DNA, 43 bp, Artificial Sequence; identical to SEQ ID NO: 19281
  Probe

SEQ ID NO: 39483 - DNA, 44 bp, Artificial Sequence; identical to SEQ ID NO: 19282
  Probe

SEQ ID NO: 39484 - DNA, 30 bp, Artificial Sequence; identical to SEQ ID NO: 19289
  Probe

SEQ ID NO: 39485 - DNA, 33 bp, Artificial Sequence; identical to SEQ ID NO: 5087
  Probe

SEQ ID NO: 39486 - DNA, 36 bp, Artificial Sequence; identical to SEQ ID NO: 19294
  Probe

SEQ ID NO: 39487 - DNA, 27 bp, Artificial Sequence
  Probe
cgggctcacatcaccccataaacaaat

SEQ ID NO: 39488 - DNA, 28 bp, Artificial Sequence
  Probe
cggggttcgattccccgacggggaggca

SEQ ID NO: 39489 - DNA, 34 bp, Artificial Sequence; identical to SEQ ID NO: 790
  Probe

SEQ ID NO: 39490 - DNA, 50 bp, Artificial Sequence; identical to SEQ ID NO: 791
  Probe

SEQ ID NO: 39491 - DNA, 31 bp, Artificial Sequence
  Probe
cggtcctcgttagtatagtggtgagtatccc

SEQ ID NO: 39492 - DNA, 32 bp, Artificial Sequence
  Probe
cggtcctcgttagtatagtggtgagtatcccc

SEQ ID NO: 39493 - DNA, 33 bp, Artificial Sequence
  Probe
cggtcctcgttagtatagtggtgagtatccccg

SEQ ID NO: 39494 - DNA, 28 bp, Artificial Sequence
  Probe
cggtgcctccgtgtttcccccacgcttt

SEQ ID NO: 39495 - DNA, 29 bp, Artificial Sequence
  Probe
cggtgcctccgtgtttcccccacgctttt

SEQ ID NO: 39496 - DNA, 20 bp, Artificial Sequence
  Probe
cggtggggattctggtctcc

SEQ ID NO: 39497 - DNA, 27 bp, Artificial Sequence
  Probe
cggtggggattctggtctccaatggag

SEQ ID NO: 39498 - DNA, 32 bp, Artificial Sequence
  Probe
cggttcctcgttagtatagtggtgagtatccc

SEQ ID NO: 39499 - DNA, 33 bp, Artificial Sequence
  Probe
cggttcctcgttagtatagtggtgagtatcccc

SEQ ID NO: 39500 - DNA, 34 bp, Artificial Sequence
  Probe
cggttcctcgttagtatagtggtgagtatccccg

SEQ ID NO: 39501 - DNA, 21 bp, Artificial Sequence
  Probe
cgtaaacaggagatcctgggt

SEQ ID NO: 39502 - DNA, 24 bp, Artificial Sequence
  Probe
cgtagtgtagtggtcatcacgttc

SEQ ID NO: 39503 - DNA, 18 bp, Artificial Sequence
  Probe
cgtagtgtagtggttatc

SEQ ID NO: 39504 - DNA, 21 bp, Artificial Sequence
  Probe
cgtagtgtagtggttatcacg

SEQ ID NO: 39505 - DNA, 23 bp, Artificial Sequence
  Probe
cgtagtgtagtggttatcacgtt

SEQ ID NO: 39506 - DNA, 24 bp, Artificial Sequence
  Probe
cgtagtgtagtggttatcacgttc

SEQ ID NO: 39507 - DNA, 25 bp, Artificial Sequence
  Probe
cgtagtgtagtggttatcacgttcg

SEQ ID NO: 39508 - DNA, 26 bp, Artificial Sequence
  Probe
cgtagtgtagtggttatcacgttcgc

SEQ ID NO: 39509 - DNA, 27 bp, Artificial Sequence
  Probe
cgtagtgtagtggttatcacgttcgcc

SEQ ID NO: 39510 - DNA, 28 bp, Artificial Sequence
  Probe
cgtagtgtagtggttatcacgttcgcct

SEQ ID NO: 39511 - DNA, 50 bp, Artificial Sequence; identical to SEQ ID NO: 5112
  Probe

SEQ ID NO: 39512 - DNA, 50 bp, Artificial Sequence; identical to SEQ ID NO: 5113
  Probe

SEQ ID NO: 39513 - DNA, 17 bp, Artificial Sequence
  Probe
cgtatagtggttagtac

SEQ ID NO: 39514 - DNA, 18 bp, Artificial Sequence
  Probe
cgtatagtggttagtact

SEQ ID NO: 39515 - DNA, 21 bp, Artificial Sequence
  Probe
cgtatagtggttagtactctg

SEQ ID NO: 39516 - DNA, 23 bp, Artificial Sequence
  Probe
cgtatagtggttagtactctgcg

SEQ ID NO: 39517 - DNA, 34 bp, Artificial Sequence
  Probe
cgtatgaggccccgggttcaatccccggcatctc

SEQ ID NO: 39518 - DNA, 36 bp, Artificial Sequence
  Probe
cgtatgaggccccgggttcaatccccggcatctcca

SEQ ID NO: 39519 - DNA, 39 bp, Artificial Sequence; identical to SEQ ID NO: 19362
  Probe

SEQ ID NO: 39520 - DNA, 18 bp, Artificial Sequence
  Probe
cgtcagtctcataatctg

SEQ ID NO: 39521 - DNA, 20 bp, Artificial Sequence
  Probe
cgtccaagctctttccattt

SEQ ID NO: 39522 - DNA, 21 bp, Artificial Sequence
  Probe
cgtccaagctctttccatttt

SEQ ID NO: 39523 - DNA, 23 bp, Artificial Sequence
  Probe
cgtgatcgtatagtggttagtac

SEQ ID NO: 39524 - DNA, 24 bp, Artificial Sequence
  Probe
cgtgatcgtatagtggttagtact

SEQ ID NO: 39525 - DNA, 27 bp, Artificial Sequence
  Probe
cgtgatcgtatagtggttagtactctg

SEQ ID NO: 39526 - DNA, 28 bp, Artificial Sequence
  Probe
cgtgatcgtatagtggttagtactctgc

SEQ ID NO: 39527 - DNA, 24 bp, Artificial Sequence
  Probe
cgtgctgctactaatgccagggtc

SEQ ID NO: 39528 - DNA, 25 bp, Artificial Sequence
  Probe
cgtgctgctactaatgccagggtcg

SEQ ID NO: 39529 - DNA, 50 bp, Artificial Sequence
  Probe
cgtggcaatccttaggtcgctggttcgattccggctcgaaggacttcgtc

SEQ ID NO: 39530 - DNA, 28 bp, Artificial Sequence
  Probe
cgtggttgtagtccgtgcgagaataatg

SEQ ID NO: 39531 - DNA, 21 bp, Artificial Sequence
  Probe
cgtgttgaggattctggtctc

SEQ ID NO: 39532 - DNA, 18 bp, Artificial Sequence
  Probe
cgttagtatagtggtgag

SEQ ID NO: 39533 - DNA, 22 bp, Artificial Sequence
  Probe
cgttcaggtcgcagtctcccct

SEQ ID NO: 39534 - DNA, 23 bp, Artificial Sequence
  Probe
cgttgggcgcgggttgtaacttt

SEQ ID NO: 39535 - DNA, 24 bp, Artificial Sequence
  Probe
cgttgggcgcgggttgtaactttt

SEQ ID NO: 39536 - DNA, 25 bp, Artificial Sequence
  Probe
cgttggtctaggggtatgattctcg

SEQ ID NO: 39537 - DNA, 28 bp, Artificial Sequence
  Probe
cgttggtggtatagtggtaagcatagct

SEQ ID NO: 39538 - DNA, 29 bp, Artificial Sequence
  Probe
cgttggtggtatagtggtaagcatagctg

SEQ ID NO: 39539 - DNA, 28 bp, Artificial Sequence
  Probe
cgttggtggtatagtggtgagcatagct

SEQ ID NO: 39540 - DNA, 29 bp, Artificial Sequence
  Probe
cgttggtggtatagtggtgagcatagctg

SEQ ID NO: 39541 - DNA, 29 bp, Artificial Sequence
  Probe
cgttggtggtatagtggttagcatagctg

SEQ ID NO: 39542 - DNA, 30 bp, Artificial Sequence; identical to SEQ ID NO: 5141
  Probe

SEQ ID NO: 39543 - DNA, 31 bp, Artificial Sequence; identical to SEQ ID NO: 5142
  Probe

SEQ ID NO: 39544 - DNA, 32 bp, Artificial Sequence; identical to SEQ ID NO: 5143
  Probe

SEQ ID NO: 39545 - DNA, 33 bp, Artificial Sequence; identical to SEQ ID NO: 5144
  Probe

SEQ ID NO: 39546 - DNA, 34 bp, Artificial Sequence; identical to SEQ ID NO: 5145
  Probe

SEQ ID NO: 39547 - DNA, 35 bp, Artificial Sequence; identical to SEQ ID NO: 5146
  Probe

SEQ ID NO: 39548 - DNA, 36 bp, Artificial Sequence; identical to SEQ ID NO: 5147
  Probe

SEQ ID NO: 39549 - DNA, 37 bp, Artificial Sequence; identical to SEQ ID NO: 5148
  Probe

SEQ ID NO: 39550 - DNA, 22 bp, Artificial Sequence
  Probe
ctaaatcctatatatcttaatg

SEQ ID NO: 39551 - DNA, 19 bp, Artificial Sequence
  Probe
ctaacacgcgaaaggtccc

SEQ ID NO: 39552 - DNA, 20 bp, Artificial Sequence
  Probe
ctaacacgcgaaaggtcccc

SEQ ID NO: 39553 - DNA, 21 bp, Artificial Sequence
  Probe
ctaacacgcgaaaggtccccg

SEQ ID NO: 39554 - DNA, 22 bp, Artificial Sequence
  Probe
ctaacacgcgaaaggtccccgg

SEQ ID NO: 39555 - DNA, 21 bp, Artificial Sequence
  Probe
ctaacacgcgaaaggtccctg

SEQ ID NO: 39556 - DNA, 22 bp, Artificial Sequence
  Probe
ctaacacgcgaaaggtccctgg

SEQ ID NO: 39557 - DNA, 37 bp, Artificial Sequence; identical to SEQ ID NO: 5162
  Probe

SEQ ID NO: 39558 - DNA, 42 bp, Artificial Sequence; identical to SEQ ID NO: 5167
  Probe

SEQ ID NO: 39559 - DNA, 50 bp, Artificial Sequence; identical to SEQ ID NO: 5168
  Probe

SEQ ID NO: 39560 - DNA, 17 bp, Artificial Sequence
  Probe
ctaagccagggattgtg

SEQ ID NO: 39561 - DNA, 42 bp, Artificial Sequence
  Probe
ctaagccagggattgtgggttcgagtcccacctggggtgtcg

SEQ ID NO: 39562 - DNA, 42 bp, Artificial Sequence; identical to SEQ ID NO: 30715
  Probe

SEQ ID NO: 39563 - DNA, 34 bp, Artificial Sequence; identical to SEQ ID NO: 13235
  Probe

SEQ ID NO: 39564 - DNA, 38 bp, Artificial Sequence; identical to SEQ ID NO: 5173
  Probe

SEQ ID NO: 39565 - DNA, 19 bp, Artificial Sequence
  Probe
ctaataacgccaaggtcgc

SEQ ID NO: 39566 - DNA, 21 bp, Artificial Sequence
  Probe
ctaataacgccaaggtcgcgg

SEQ ID NO: 39567 - DNA, 22 bp, Artificial Sequence
  Probe
ctaataacgccaaggtcgcggg

SEQ ID NO: 39568 - DNA, 23 bp, Artificial Sequence
  Probe
ctaataacgccaaggtcgcgggt

SEQ ID NO: 39569 - DNA, 24 bp, Artificial Sequence
  Probe
ctaataacgccaaggtcgcgggtt

SEQ ID NO: 39570 - DNA, 25 bp, Artificial Sequence
  Probe
ctaataacgccaaggtcgcgggttc

SEQ ID NO: 39571 - DNA, 26 bp, Artificial Sequence
  Probe
ctaataacgccaaggtcgcgggttcg

SEQ ID NO: 39572 - DNA, 35 bp, Artificial Sequence
  Probe
ctaataacgccaaggtcgcgggttcgatccccgta

SEQ ID NO: 39573 - DNA, 50 bp, Artificial Sequence
  Probe
ctaataacgccaaggtcgcgggttcgatccccgtacgggccaactttgtt

SEQ ID NO: 39574 - DNA, 50 bp, Artificial Sequence
  Probe
ctaataacgccaaggtcgcgggttcgatccccgtacgggccacaggcttt

SEQ ID NO: 39575 - DNA, 45 bp, Artificial Sequence
  Probe
ctaataacgccaaggtcgcgggttcgatccccgtacgggccacga

SEQ ID NO: 39576 - DNA, 50 bp, Artificial Sequence
  Probe
ctaataacgccaaggtcgcgggttcgatccccgtacgggccacgagggtt

SEQ ID NO: 39577 - DNA, 45 bp, Artificial Sequence
  Probe
ctaataacgccaaggtcgcgggttcgatccccgtacgggccactg

SEQ ID NO: 39578 - DNA, 50 bp, Artificial Sequence
  Probe
ctaataacgccaaggtcgcgggttcgatccccgtacgggccactggatgc

SEQ ID NO: 39579 - DNA, 45 bp, Artificial Sequence
  Probe
ctaataacgccaaggtcgcgggttcgatccccgtacgggccagga

SEQ ID NO: 39580 - DNA, 50 bp, Artificial Sequence
  Probe
ctaataacgccaaggtcgcgggttcgatccccgtacgggccaggattgaa

SEQ ID NO: 39581 - DNA, 45 bp, Artificial Sequence
  Probe
ctaataacgccaaggtcgcgggttcgatccccgtacgggccaggc

SEQ ID NO: 39582 - DNA, 50 bp, Artificial Sequence
  Probe
ctaataacgccaaggtcgcgggttcgatccccgtacgggccaggctaact

SEQ ID NO: 39583 - DNA, 45 bp, Artificial Sequence
  Probe
ctaataacgccaaggtcgcgggttcgatccccgtactggccaagt

SEQ ID NO: 39584 - DNA, 50 bp, Artificial Sequence
  Probe
ctaataacgccaaggtcgcgggttcgatccccgtactggccaagtattct

SEQ ID NO: 39585 - DNA, 45 bp, Artificial Sequence
  Probe
ctaataacgccaaggtcgcgggttcgatccccgtactggccacgt

SEQ ID NO: 39586 - DNA, 50 bp, Artificial Sequence
  Probe
ctaataacgccaaggtcgcgggttcgatccccgtactggccacgtatttt

SEQ ID NO: 39587 - DNA, 22 bp, Artificial Sequence
  Probe
ctaataacgctaaggtcgcggg

SEQ ID NO: 39588 - DNA, 23 bp, Artificial Sequence
  Probe
ctaataacgctaaggtcgcgggt

SEQ ID NO: 39589 - DNA, 18 bp, Artificial Sequence
  Probe
ctaatggataaggcactg

SEQ ID NO: 39590 - DNA, 36 bp, Artificial Sequence
  Probe
ctaatggtggagttaaagactttttctctgatttgt

SEQ ID NO: 39591 - DNA, 41 bp, Artificial Sequence; identical to SEQ ID NO: 5177
  Probe

SEQ ID NO: 39592 - DNA, 21 bp, Artificial Sequence
  Probe
ctacggatcagaagattccag

SEQ ID NO: 39593 - DNA, 22 bp, Artificial Sequence
  Probe
ctacggatcagaagattccagg

SEQ ID NO: 39594 - DNA, 21 bp, Artificial Sequence
  Probe
ctacggatcagaagattctag

SEQ ID NO: 39595 - DNA, 20 bp, Artificial Sequence
  Probe
ctagaaatccattggggtct

SEQ ID NO: 39596 - DNA, 25 bp, Artificial Sequence
  Probe
ctagaaatccattggggtctccccg

SEQ ID NO: 39597 - DNA, 29 bp, Artificial Sequence
  Probe
ctagaaatccattggggtctccccgcgca

SEQ ID NO: 39598 - DNA, 31 bp, Artificial Sequence
  Probe
ctagaaatccattggggtctccccgcgcagg

SEQ ID NO: 39599 - DNA, 30 bp, Artificial Sequence
  Probe
ctagaaatccattggggtttccccgcgcag

SEQ ID NO: 39600 - DNA, 18 bp, Artificial Sequence
  Probe
ctagcggttaggattcct

SEQ ID NO: 39601 - DNA, 18 bp, Artificial Sequence
  Probe
ctagctcagtcggtagag

SEQ ID NO: 39602 - DNA, 20 bp, Artificial Sequence
  Probe
ctagctcagtcggtagagca

SEQ ID NO: 39603 - DNA, 22 bp, Artificial Sequence
  Probe
ctagctcagtcggtagagcatg

SEQ ID NO: 39604 - DNA, 23 bp, Artificial Sequence
  Probe
ctagctcagtcggtagagcatga

SEQ ID NO: 39605 - DNA, 23 bp, Artificial Sequence
  Probe
ctagctcagtcggtagagcatgg

SEQ ID NO: 39606 - DNA, 17 bp, Artificial Sequence
  Probe
ctaggggtatgattctc

SEQ ID NO: 39607 - DNA, 18 bp, Artificial Sequence
  Probe
ctaggggtatgattctcg

SEQ ID NO: 39608 - DNA, 22 bp, Artificial Sequence
  Probe
ctagtaaacaggagatcctggg

SEQ ID NO: 39609 - DNA, 45 bp, Artificial Sequence
  Probe
ctagtaaacaggagatcctgggttcgactcccagcggggccttgg

SEQ ID NO: 39610 - DNA, 17 bp, Artificial Sequence
  Probe
ctagtggctaggattcg

SEQ ID NO: 39611 - DNA, 18 bp, Artificial Sequence
  Probe
ctagtggttaggattcgg

SEQ ID NO: 39612 - DNA, 50 bp, Artificial Sequence; identical to SEQ ID NO: 5202
  Probe

SEQ ID NO: 39613 - DNA, 24 bp, Artificial Sequence
  Probe
ctcacacgcgaaaggtccccggtt

SEQ ID NO: 39614 - DNA, 25 bp, Artificial Sequence
  Probe
ctcacacgcgaaaggtccccggttc

SEQ ID NO: 39615 - DNA, 45 bp, Artificial Sequence
  Probe
ctcacacgcgaaaggtccccggttcgaaaccgggcagaagcaacc

SEQ ID NO: 39616 - DNA, 42 bp, Artificial Sequence
  Probe
ctcacacgcgaaaggtccccggttcgaaaccgggcggaaaca

SEQ ID NO: 39617 - DNA, 45 bp, Artificial Sequence
  Probe
ctcacacgcgaaaggtccccggttcgaaaccgggcggaaacacct

SEQ ID NO: 39618 - DNA, 45 bp, Artificial Sequence
  Probe
ctcacacgcgaaaggtccccggttcgatcccgggcggaaacaggt

SEQ ID NO: 39619 - DNA, 22 bp, Artificial Sequence
  Probe
ctcacacggggcacaataattt

SEQ ID NO: 39620 - DNA, 20 bp, Artificial Sequence
  Probe
ctcacatcaccccataaaca

SEQ ID NO: 39621 - DNA, 23 bp, Artificial Sequence
  Probe
ctcacatcaccccataaacaaat

SEQ ID NO: 39622 - DNA, 36 bp, Artificial Sequence; identical to SEQ ID NO: 25293
  Probe

SEQ ID NO: 39623 - DNA, 37 bp, Artificial Sequence
  Probe
ctcaccgccgcggcccgggttcgattcccggtcaggg

SEQ ID NO: 39624 - DNA, 42 bp, Artificial Sequence; identical to SEQ ID NO: 19507
  Probe

SEQ ID NO: 39625 - DNA, 42 bp, Artificial Sequence; identical to SEQ ID NO: 19508
  Probe

SEQ ID NO: 39626 - DNA, 23 bp, Artificial Sequence
  Probe
ctcagagggggcagctgccattt

SEQ ID NO: 39627 - DNA, 32 bp, Artificial Sequence; identical to SEQ ID NO: 816
  Probe

SEQ ID NO: 39628 - DNA, 18 bp, Artificial Sequence
  Probe
ctcagtcggtagagcatg

SEQ ID NO: 39629 - DNA, 17 bp, Artificial Sequence
  Probe
ctcataatctgaaggtc

SEQ ID NO: 39630 - DNA, 20 bp, Artificial Sequence
  Probe
ctcataatctgaaggtcctg

SEQ ID NO: 39631 - DNA, 21 bp, Artificial Sequence
  Probe
ctcataatctgaaggtcctga

SEQ ID NO: 39632 - DNA, 22 bp, Artificial Sequence
  Probe
ctcataatctgaaggtcctgag

SEQ ID NO: 39633 - DNA, 23 bp, Artificial Sequence
  Probe
ctcataatctgaaggtcctgagt

SEQ ID NO: 39634 - DNA, 45 bp, Artificial Sequence
  Probe
ctcataatctgaaggtcctgagttcgaacctcagagggggcagct

SEQ ID NO: 39635 - DNA, 18 bp, Artificial Sequence
  Probe
ctcataatctgaaggtcg

SEQ ID NO: 39636 - DNA, 41 bp, Artificial Sequence
  Probe
ctcataatctgaaggtcgtgagttcgagcctcacacggggc

SEQ ID NO: 39637 - DNA, 50 bp, Artificial Sequence
  Probe
ctcataatctgaaggtcgtgagttcgagcctcacacggggcagtctaacg

SEQ ID NO: 39638 - DNA, 45 bp, Artificial Sequence
  Probe
ctcataatctgaaggtcgtgagttcgatcctcacacggggcacaa

SEQ ID NO: 39639 - DNA, 50 bp, Artificial Sequence
  Probe
ctcataatctgaaggtcgtgagttcgatcctcacacggggcacaataatt

SEQ ID NO: 39640 - DNA, 33 bp, Artificial Sequence; identical to SEQ ID NO: 5239
  Probe

SEQ ID NO: 39641 - DNA, 34 bp, Artificial Sequence; identical to SEQ ID NO: 5240
  Probe

SEQ ID NO: 39642 - DNA, 35 bp, Artificial Sequence; identical to SEQ ID NO: 5241
  Probe

SEQ ID NO: 39643 - DNA, 37 bp, Artificial Sequence; identical to SEQ ID NO: 5243
  Probe

SEQ ID NO: 39644 - DNA, 38 bp, Artificial Sequence; identical to SEQ ID NO: 5244
  Probe

SEQ ID NO: 39645 - DNA, 34 bp, Artificial Sequence; identical to SEQ ID NO: 5247
  Probe

SEQ ID NO: 39646 - DNA, 22 bp, Artificial Sequence
  Probe
ctccagatcagaaggttgcgtg

SEQ ID NO: 39647 - DNA, 22 bp, Artificial Sequence
  Probe
ctccagtctcttcggaggcgtg

SEQ ID NO: 39648 - DNA, 20 bp, Artificial Sequence
  Probe
ctccagtctcttcgggggcg

SEQ ID NO: 39649 - DNA, 24 bp, Artificial Sequence
  Probe
ctccagtctcttcgggggcgtggg

SEQ ID NO: 39650 - DNA, 50 bp, Artificial Sequence; identical to SEQ ID NO: 5249
  Probe

SEQ ID NO: 39651 - DNA, 27 bp, Artificial Sequence
  Probe
ctccatagctcaggggttagagcactg

SEQ ID NO: 39652 - DNA, 27 bp, Artificial Sequence
  Probe
ctccatagctcagtggttagagcactg

SEQ ID NO: 39653 - DNA, 39 bp, Artificial Sequence
  Probe
ctcccacgcgggagacccgggttcaattcccggccaatg

SEQ ID NO: 39654 - DNA, 18 bp, Artificial Sequence
  Probe
ctcccgccttttttcccg

SEQ ID NO: 39655 - DNA, 24 bp, Artificial Sequence
  Probe
ctcccgccttttttcccggcggcg

SEQ ID NO: 39656 - DNA, 26 bp, Artificial Sequence
  Probe
ctcccgccttttttcccggcggcggg

SEQ ID NO: 39657 - DNA, 27 bp, Artificial Sequence
  Probe
ctcccgccttttttcccggcggcggga

SEQ ID NO: 39658 - DNA, 28 bp, Artificial Sequence
  Probe
ctcccgccttttttcccggcggcgggag

SEQ ID NO: 39659 - DNA, 30 bp, Artificial Sequence; identical to SEQ ID NO: 5265
  Probe

SEQ ID NO: 39660 - DNA, 29 bp, Artificial Sequence
  Probe
ctccctggtggtctagtggttaggattcg

SEQ ID NO: 39661 - DNA, 30 bp, Artificial Sequence; identical to SEQ ID NO: 9905
  Probe

SEQ ID NO: 39662 - DNA, 32 bp, Artificial Sequence
  Probe
ctccctggtggtctagtggttaggattcggcg

SEQ ID NO: 39663 - DNA, 20 bp, Artificial Sequence
  Probe
ctcctaagccagggattgtg

SEQ ID NO: 39664 - DNA, 45 bp, Artificial Sequence
  Probe
ctcctaagccagggattgtgggttcgagtcccacccggggtaaag

SEQ ID NO: 39665 - DNA, 45 bp, Artificial Sequence
  Probe
ctcctaagccagggattgtgggttcgagtcccacctggggtgtcg

SEQ ID NO: 39666 - DNA, 30 bp, Artificial Sequence
  Probe
ctcctcgttagtatagtggtgagtatcccc

SEQ ID NO: 39667 - DNA, 31 bp, Artificial Sequence
  Probe
ctcctcgttagtatagtggtgagtatccccg

SEQ ID NO: 39668 - DNA, 30 bp, Artificial Sequence
  Probe
ctcctcgttagtatagtggttagtatcccc

SEQ ID NO: 39669 - DNA, 31 bp, Artificial Sequence
  Probe
ctcctcgttagtatagtggttagtatccccg

SEQ ID NO: 39670 - DNA, 27 bp, Artificial Sequence
  Probe
ctcctggctggctcgcgatgtctgttt

SEQ ID NO: 39671 - DNA, 28 bp, Artificial Sequence
  Probe
ctcctggctggctcgcgatgtctgtttt

SEQ ID NO: 39672 - DNA, 31 bp, Artificial Sequence
  Probe
ctcctggctggctcgcttgtgctctcacttt

SEQ ID NO: 39673 - DNA, 31 bp, Artificial Sequence
  Probe
ctcgaaatccaatgggggttccccgcgcagg

SEQ ID NO: 39674 - DNA, 26 bp, Artificial Sequence
  Probe
ctcgaaatccaatggggtctccccgc

SEQ ID NO: 39675 - DNA, 29 bp, Artificial Sequence
  Probe
ctcgaaatccaatggggtctccccgcgca

SEQ ID NO: 39676 - DNA, 31 bp, Artificial Sequence
  Probe
ctcgaaatccaatggggtctccccgcgcagg

SEQ ID NO: 39677 - DNA, 50 bp, Artificial Sequence
  Probe
ctcgaaatccaatggggtctccccgcgcaggttcgaatcctgctcacagc

SEQ ID NO: 39678 - DNA, 25 bp, Artificial Sequence
  Probe
ctcgaaggacttcgtctgtaatttt

SEQ ID NO: 39679 - DNA, 34 bp, Artificial Sequence
  Probe
ctcgattcccgcccaacgcatcgggcggaccttt

SEQ ID NO: 39680 - DNA, 32 bp, Artificial Sequence
  Probe
ctcgccgtgatcgtatagtggttagtactctg

SEQ ID NO: 39681 - DNA, 22 bp, Artificial Sequence
  Probe
ctcgtaaacaggagatcctggg

SEQ ID NO: 39682 - DNA, 45 bp, Artificial Sequence
  Probe
ctcgtaaacaggagatcctgggttcgaatcccagcggggccttag

SEQ ID NO: 39683 - DNA, 24 bp, Artificial Sequence
  Probe
ctcgtcgatgtggtggcttacttt

SEQ ID NO: 39684 - DNA, 27 bp, Artificial Sequence
  Probe
ctcgttagtatagtggtgagtatcccc

SEQ ID NO: 39685 - DNA, 28 bp, Artificial Sequence
  Probe
ctcgttagtatagtggtgagtatccccg

SEQ ID NO: 39686 - DNA, 27 bp, Artificial Sequence
  Probe
ctcgttggtctaggggtatgattctcg

SEQ ID NO: 39687 - DNA, 22 bp, Artificial Sequence
  Probe
ctctcaccgccgcggcccgggt

SEQ ID NO: 39688 - DNA, 27 bp, Artificial Sequence
  Probe
ctctcaccgccgcggcccgggttcgat

SEQ ID NO: 39689 - DNA, 29 bp, Artificial Sequence
  Probe
ctctcaccgccgcggcccgggttcgattc

SEQ ID NO: 39690 - DNA, 31 bp, Artificial Sequence
  Probe
ctctcaccgccgcggcccgggttcgattccc

SEQ ID NO: 39691 - DNA, 32 bp, Artificial Sequence
  Probe
ctctcaccgccgcggcccgggttcgattcccg

SEQ ID NO: 39692 - DNA, 33 bp, Artificial Sequence
  Probe
ctctcaccgccgcggcccgggttcgattcccgg

SEQ ID NO: 39693 - DNA, 34 bp, Artificial Sequence
  Probe
ctctcaccgccgcggcccgggttcgattcccggt

SEQ ID NO: 39694 - DNA, 36 bp, Artificial Sequence; identical to SEQ ID NO: 30907
  Probe

SEQ ID NO: 39695 - DNA, 37 bp, Artificial Sequence
  Probe
ctctcaccgccgcggcccgggttcgattcccggtcag

SEQ ID NO: 39696 - DNA, 38 bp, Artificial Sequence
  Probe
ctctcaccgccgcggcccgggttcgattcccggtcagg

SEQ ID NO: 39697 - DNA, 39 bp, Artificial Sequence
  Probe
ctctcaccgccgcggcccgggttcgattcccggtcagga

SEQ ID NO: 39698 - DNA, 41 bp, Artificial Sequence
  Probe
ctctcaccgccgcggcccgggttcgattcccggtcaggaaa

SEQ ID NO: 39699 - DNA, 50 bp, Artificial Sequence
  Probe
ctctcaccgccgcggcccgggttcgattcccggtcaggaaagtaagccgt

SEQ ID NO: 39700 - DNA, 42 bp, Artificial Sequence
  Probe
ctctcaccgccgcggcccgggttcgattcccggtcagggaaa

SEQ ID NO: 39701 - DNA, 44 bp, Artificial Sequence; identical to SEQ ID NO: 30908
  Probe

SEQ ID NO: 39702 - DNA, 46 bp, Artificial Sequence
  Probe
ctctcaccgccgcggcccgggttcgattcccggtcagggaaagagt

SEQ ID NO: 39703 - DNA, 50 bp, Artificial Sequence
  Probe
ctctcaccgccgcggcccgggttcgattcccggtcagggaaagagtaaca

SEQ ID NO: 39704 - DNA, 42 bp, Artificial Sequence
  Probe
ctctcaccgccgcggcccgggttcgattcccggtcagggaag

SEQ ID NO: 39705 - DNA, 44 bp, Artificial Sequence; identical to SEQ ID NO: 19591
  Probe

SEQ ID NO: 39706 - DNA, 45 bp, Artificial Sequence
  Probe
ctctcaccgccgcggcccgggttcgattcccggtcagggaagcct

SEQ ID NO: 39707 - DNA, 46 bp, Artificial Sequence
  Probe
ctctcaccgccgcggcccgggttcgattcccggtcagggaagcctt

SEQ ID NO: 39708 - DNA, 50 bp, Artificial Sequence
  Probe
ctctcaccgccgcggcccgggttcgattcccggtcagggaagccttcctt

SEQ ID NO: 39709 - DNA, 44 bp, Artificial Sequence; identical to SEQ ID NO: 19592
  Probe

SEQ ID NO: 39710 - DNA, 45 bp, Artificial Sequence
  Probe
ctctcaccgccgcggcccgggttcgattcccggtcagggaagtct

SEQ ID NO: 39711 - DNA, 46 bp, Artificial Sequence
  Probe
ctctcaccgccgcggcccgggttcgattcccggtcagggaagtctt

SEQ ID NO: 39712 - DNA, 50 bp, Artificial Sequence
  Probe
ctctcaccgccgcggcccgggttcgattcccggtcagggaagtcttgttt

SEQ ID NO: 39713 - DNA, 42 bp, Artificial Sequence
  Probe
ctctcaccgccgcggcccgggttcgattcccggtcagggaat

SEQ ID NO: 39714 - DNA, 44 bp, Artificial Sequence; identical to SEQ ID NO: 30910
  Probe

SEQ ID NO: 39715 - DNA, 45 bp, Artificial Sequence
  Probe
ctctcaccgccgcggcccgggttcgattcccggtcagggaatgag

SEQ ID NO: 39716 - DNA, 46 bp, Artificial Sequence
  Probe
ctctcaccgccgcggcccgggttcgattcccggtcagggaatgagg

SEQ ID NO: 39717 - DNA, 50 bp, Artificial Sequence
  Probe
ctctcaccgccgcggcccgggttcgattcccggtcagggaatgaggtttt

SEQ ID NO: 39718 - DNA, 22 bp, Artificial Sequence
  Probe
ctctgaatccagcgatccgagt

SEQ ID NO: 39719 - DNA, 31 bp, Artificial Sequence
  Probe
ctctgaatccagcgatccgagttcaaatctc

SEQ ID NO: 39720 - DNA, 41 bp, Artificial Sequence
  Probe
ctctgaatccagcgatccgagttcaaatctcggtggaacct

SEQ ID NO: 39721 - DNA, 44 bp, Artificial Sequence; identical to SEQ ID NO: 5275
  Probe

SEQ ID NO: 39722 - DNA, 17 bp, Artificial Sequence
  Probe
ctctggcagttctcaag

SEQ ID NO: 39723 - DNA, 20 bp, Artificial Sequence
  Probe
ctcttaatcccagggtcgtg

SEQ ID NO: 39724 - DNA, 21 bp, Artificial Sequence
  Probe
ctcttaatcccagggtcgtgg

SEQ ID NO: 39725 - DNA, 45 bp, Artificial Sequence
  Probe
ctcttaatcccagggtcgtgggttcgagccccacgttgggcgggt

SEQ ID NO: 39726 - DNA, 50 bp, Artificial Sequence
  Probe
ctcttaatcccagggtcgtgggttcgagccccacgttgggcgggtttgtt

SEQ ID NO: 39727 - DNA, 20 bp, Artificial Sequence
  Probe
ctcttaatctcagggtcgtg

SEQ ID NO: 39728 - DNA, 21 bp, Artificial Sequence
  Probe
ctcttaatctcagggtcgtgg

SEQ ID NO: 39729 - DNA, 22 bp, Artificial Sequence
  Probe
ctcttaatctcagggtcgtggg

SEQ ID NO: 39730 - DNA, 23 bp, Artificial Sequence
  Probe
ctcttaatctcagggtcgtgggt

SEQ ID NO: 39731 - DNA, 50 bp, Artificial Sequence
  Probe
ctcttaatctcagggtcgtgggttcgagccccacgttgggcgattccttt

SEQ ID NO: 39732 - DNA, 50 bp, Artificial Sequence
  Probe
ctcttaatctcagggtcgtgggttcgagccccacgttgggcgctctggtt

SEQ ID NO: 39733 - DNA, 45 bp, Artificial Sequence
  Probe
ctcttaatctcagggtcgtgggttcgagccccacgttgggcgctg

SEQ ID NO: 39734 - DNA, 50 bp, Artificial Sequence
  Probe
ctcttaatctcagggtcgtgggttcgagccccacgttgggcgctgtgttt

SEQ ID NO: 39735 - DNA, 45 bp, Artificial Sequence
  Probe
ctcttaatctcagggtcgtgggttcgagccccacgttgggcggca

SEQ ID NO: 39736 - DNA, 50 bp, Artificial Sequence
  Probe
ctcttaatctcagggtcgtgggttcgagccccacgttgggcggcaactgg

SEQ ID NO: 39737 - DNA, 50 bp, Artificial Sequence
  Probe
ctcttaatctcagggtcgtgggttcgagccccacgttgggcgtaatttcg

SEQ ID NO: 39738 - DNA, 50 bp, Artificial Sequence; identical to SEQ ID NO: 5278
  Probe

SEQ ID NO: 39739 - DNA, 42 bp, Artificial Sequence; identical to SEQ ID NO: 5280
  Probe

SEQ ID NO: 39740 - DNA, 43 bp, Artificial Sequence; identical to SEQ ID NO: 5281
  Probe

SEQ ID NO: 39741 - DNA, 44 bp, Artificial Sequence; identical to SEQ ID NO: 5282
  Probe

SEQ ID NO: 39742 - DNA, 21 bp, Artificial Sequence
  Probe
ctgaagatctaaaggtccctg

SEQ ID NO: 39743 - DNA, 22 bp, Artificial Sequence
  Probe
ctgaagatctaaaggtccctgg

SEQ ID NO: 39744 - DNA, 50 bp, Artificial Sequence
  Probe
ctgaaggcattcaaaggttccgggttcgagtcccggcggagtcgtaacgc

SEQ ID NO: 39745 - DNA, 20 bp, Artificial Sequence
  Probe
ctgaatccagcgatccgagt

SEQ ID NO: 39746 - DNA, 36 bp, Artificial Sequence; identical to SEQ ID NO: 5300
  Probe

SEQ ID NO: 39747 - DNA, 32 bp, Artificial Sequence; identical to SEQ ID NO: 5303
  Probe

SEQ ID NO: 39748 - DNA, 21 bp, Artificial Sequence
  Probe
ctgataacaccaaggtcgcgg

SEQ ID NO: 39749 - DNA, 22 bp, Artificial Sequence
  Probe
ctgataacaccaaggtcgcggg

SEQ ID NO: 39750 - DNA, 23 bp, Artificial Sequence
  Probe
ctgataacaccaaggtcgcgggc

SEQ ID NO: 39751 - DNA, 30 bp, Artificial Sequence
  Probe
ctgcagctagctcagtcggtagagcatgag

SEQ ID NO: 39752 - DNA, 31 bp, Artificial Sequence; identical to SEQ ID NO: 19621
  Probe

SEQ ID NO: 39753 - DNA, 32 bp, Artificial Sequence; identical to SEQ ID NO: 19622
  Probe

SEQ ID NO: 39754 - DNA, 28 bp, Artificial Sequence
  Probe
ctgccacacctcagaaggtctcactttt

SEQ ID NO: 39755 - DNA, 21 bp, Artificial Sequence
  Probe
ctgccacgcgggaggcccggg

SEQ ID NO: 39756 - DNA, 35 bp, Artificial Sequence
  Probe
ctgccacgcgggaggcccgggttcgattcccggcc

SEQ ID NO: 39757 - DNA, 38 bp, Artificial Sequence
  Probe
ctgccacgcgggaggcccgggttcgattcccggccaat

SEQ ID NO: 39758 - DNA, 41 bp, Artificial Sequence
  Probe
ctgccacgcgggaggcccgggttcgattcccggccaatgca

SEQ ID NO: 39759 - DNA, 50 bp, Artificial Sequence
  Probe
ctgccacgcgggaggcccgggttcgattcccggccaatgcaacgatgacg

SEQ ID NO: 39760 - DNA, 50 bp, Artificial Sequence
  Probe
ctgccacgcgggaggcccgggttcgattcccggccaatgcaagttttgac

SEQ ID NO: 39761 - DNA, 50 bp, Artificial Sequence
  Probe
ctgccacgcgggaggcccgggttcgattcccggccaatgcacgagtacag

SEQ ID NO: 39762 - DNA, 50 bp, Artificial Sequence
  Probe
ctgccacgcgggaggcccgggttcgattcccggccaatgcactttcattt

SEQ ID NO: 39763 - DNA, 50 bp, Artificial Sequence
  Probe
ctgccacgcgggaggcccgggttcgattcccggccaatgcagcagctgaa

SEQ ID NO: 39764 - DNA, 41 bp, Artificial Sequence
  Probe
ctgccacgcgggaggcccgggttcgattcccggcccatgca

SEQ ID NO: 39765 - DNA, 44 bp, Artificial Sequence
  Probe
ctgccacgcgggaggcccgggttcgattcccggcccatgcagca

SEQ ID NO: 39766 - DNA, 50 bp, Artificial Sequence
  Probe
ctgccacgcgggaggcccgggttcgattcccggcccatgcagcacgccct

SEQ ID NO: 39767 - DNA, 30 bp, Artificial Sequence; identical to SEQ ID NO: 5308
  Probe

SEQ ID NO: 39768 - DNA, 21 bp, Artificial Sequence
  Probe
ctgctaactcatgcccccatg

SEQ ID NO: 39769 - DNA, 45 bp, Artificial Sequence; identical to SEQ ID NO: 5323
  Probe

SEQ ID NO: 39770 - DNA, 18 bp, Artificial Sequence
  Probe
ctgctaatccattgtgct

SEQ ID NO: 39771 - DNA, 50 bp, Artificial Sequence
  Probe
ctgctaatccattgtgctttgcacgcgtgggttcgaatcccatcctcgtc

SEQ ID NO: 39772 - DNA, 24 bp, Artificial Sequence
  Probe
ctggaaagtgcacttggacgaacc

SEQ ID NO: 39773 - DNA, 30 bp, Artificial Sequence
  Probe
ctggatgccatagtggggcccttcacttac

SEQ ID NO: 39774 - DNA, 24 bp, Artificial Sequence
  Probe
ctggctggctcgcgatgtctgttt

SEQ ID NO: 39775 - DNA, 25 bp, Artificial Sequence
  Probe
ctggctggctcgcgatgtctgtttt

SEQ ID NO: 39776 - DNA, 28 bp, Artificial Sequence
  Probe
ctggctggctcgcttgtgctctcacttt

SEQ ID NO: 39777 - DNA, 32 bp, Artificial Sequence; identical to SEQ ID NO: 5327
  Probe

SEQ ID NO: 39778 - DNA, 21 bp, Artificial Sequence
  Probe
ctggggcctgcttccgtcttt

SEQ ID NO: 39779 - DNA, 25 bp, Artificial Sequence
  Probe
ctggtggtctagtggctaggattcg

SEQ ID NO: 39780 - DNA, 25 bp, Artificial Sequence
  Probe
ctggtggtctagtggttaggattcg

SEQ ID NO: 39781 - DNA, 26 bp, Artificial Sequence
  Probe
ctggtggtctagtggttaggattcgg

SEQ ID NO: 39782 - DNA, 20 bp, Artificial Sequence
  Probe
ctggtgtagtggtatcatgc

SEQ ID NO: 39783 - DNA, 25 bp, Artificial Sequence
  Probe
ctgtagtgtagtggttatcacgttc

SEQ ID NO: 39784 - DNA, 24 bp, Artificial Sequence
  Probe
ctgtcacgcgggagaccggggttc

SEQ ID NO: 39785 - DNA, 25 bp, Artificial Sequence
  Probe
ctgtcacgcgggagaccggggttca

SEQ ID NO: 39786 - DNA, 34 bp, Artificial Sequence
  Probe
ctgtcacgcgggagaccggggttcaattccccga

SEQ ID NO: 39787 - DNA, 35 bp, Artificial Sequence
  Probe
ctgtcacgcgggagaccggggttcaattccccgac

SEQ ID NO: 39788 - DNA, 37 bp, Artificial Sequence; identical to SEQ ID NO: 19671
  Probe

SEQ ID NO: 39789 - DNA, 42 bp, Artificial Sequence
  Probe
ctgtcacgcgggagaccggggttcaattccccgacggggagg

SEQ ID NO: 39790 - DNA, 44 bp, Artificial Sequence; identical to SEQ ID NO: 5338
  Probe

SEQ ID NO: 39791 - DNA, 50 bp, Artificial Sequence
  Probe
ctgtcacgcgggagaccggggttcaattccccgacggggaggtgtgtagc

SEQ ID NO: 39792 - DNA, 26 bp, Artificial Sequence
  Probe
ctgtcacgcgggagaccggggttcga

SEQ ID NO: 39793 - DNA, 27 bp, Artificial Sequence
  Probe
ctgtcacgcgggagaccggggttcgat

SEQ ID NO: 39794 - DNA, 33 bp, Artificial Sequence
  Probe
ctgtcacgcgggagaccggggttcgattcccca

SEQ ID NO: 39795 - DNA, 34 bp, Artificial Sequence
  Probe
ctgtcacgcgggagaccggggttcgattccccaa

SEQ ID NO: 39796 - DNA, 41 bp, Artificial Sequence
  Probe
ctgtcacgcgggagaccggggttcgattccccaacggggag

SEQ ID NO: 39797 - DNA, 50 bp, Artificial Sequence
  Probe
ctgtcacgcgggagaccggggttcgattccccaacggggaggctaataat

SEQ ID NO: 39798 - DNA, 33 bp, Artificial Sequence
  Probe
ctgtcacgcgggagaccggggttcgattccccg

SEQ ID NO: 39799 - DNA, 42 bp, Artificial Sequence; identical to SEQ ID NO: 19677
  Probe

SEQ ID NO: 39800 - DNA, 44 bp, Artificial Sequence; identical to SEQ ID NO: 19678
  Probe

SEQ ID NO: 39801 - DNA, 45 bp, Artificial Sequence
  Probe
ctgtcacgcgggagaccggggttcgattccccgacggggagaaaa

SEQ ID NO: 39802 - DNA, 46 bp, Artificial Sequence
  Probe
ctgtcacgcgggagaccggggttcgattccccgacggggagaaaag

SEQ ID NO: 39803 - DNA, 50 bp, Artificial Sequence
  Probe
ctgtcacgcgggagaccggggttcgattccccgacggggagaaaagttgc

SEQ ID NO: 39804 - DNA, 44 bp, Artificial Sequence; identical to SEQ ID NO: 19679
  Probe

SEQ ID NO: 39805 - DNA, 45 bp, Artificial Sequence
  Probe
ctgtcacgcgggagaccggggttcgattccccgacggggagacga

SEQ ID NO: 39806 - DNA, 50 bp, Artificial Sequence
  Probe
ctgtcacgcgggagaccggggttcgattccccgacggggagacgaagcag

SEQ ID NO: 39807 - DNA, 44 bp, Artificial Sequence; identical to SEQ ID NO: 5339
  Probe

SEQ ID NO: 39808 - DNA, 50 bp, Artificial Sequence
  Probe
ctgtcacgcgggagaccggggttcgattccccgacggggagagtactagc

SEQ ID NO: 39809 - DNA, 42 bp, Artificial Sequence; identical to SEQ ID NO: 19681
  Probe

SEQ ID NO: 39810 - DNA, 45 bp, Artificial Sequence
  Probe
ctgtcacgcgggagaccggggttcgattccccgacggggaggagg

SEQ ID NO: 39811 - DNA, 50 bp, Artificial Sequence
  Probe
ctgtcacgcgggagaccggggttcgattccccgacggggaggaggcttaa

SEQ ID NO: 39812 - DNA, 44 bp, Artificial Sequence; identical to SEQ ID NO: 5340
  Probe

SEQ ID NO: 39813 - DNA, 45 bp, Artificial Sequence
  Probe
ctgtcacgcgggagaccggggttcgattccccgacggggaggcac

SEQ ID NO: 39814 - DNA, 49 bp, Artificial Sequence
  Probe
ctgtcacgcgggagaccggggttcgattccccgacggggaggcacagta

SEQ ID NO: 39815 - DNA, 50 bp, Artificial Sequence; identical to SEQ ID NO: 5341
  Probe

SEQ ID NO: 39816 - DNA, 46 bp, Artificial Sequence
  Probe
ctgtcacgcgggagaccggggttcgattccccgacggggaggcagc

SEQ ID NO: 39817 - DNA, 50 bp, Artificial Sequence
  Probe
ctgtcacgcgggagaccggggttcgattccccgacggggaggcagccgtg

SEQ ID NO: 39818 - DNA, 44 bp, Artificial Sequence; identical to SEQ ID NO: 19684
  Probe

SEQ ID NO: 39819 - DNA, 45 bp, Artificial Sequence
  Probe
ctgtcacgcgggagaccggggttcgattccccgacggggaggcca

SEQ ID NO: 39820 - DNA, 46 bp, Artificial Sequence
  Probe
ctgtcacgcgggagaccggggttcgattccccgacggggaggccaa

SEQ ID NO: 39821 - DNA, 50 bp, Artificial Sequence
  Probe
ctgtcacgcgggagaccggggttcgattccccgacggggaggccaagtac

SEQ ID NO: 39822 - DNA, 45 bp, Artificial Sequence
  Probe
ctgtcacgcgggagaccggggttcgattccccgacggggaggccg

SEQ ID NO: 39823 - DNA, 46 bp, Artificial Sequence
  Probe
ctgtcacgcgggagaccggggttcgattccccgacggggaggccgg

SEQ ID NO: 39824 - DNA, 50 bp, Artificial Sequence
  Probe
ctgtcacgcgggagaccggggttcgattccccgacggggaggccgggtac

SEQ ID NO: 39825 - DNA, 23 bp, Artificial Sequence
  Probe
ctgtgctccggagttacctcgtt

SEQ ID NO: 39826 - DNA, 24 bp, Artificial Sequence
  Probe
ctgtgctccggagttacctcgttt

SEQ ID NO: 39827 - DNA, 25 bp, Artificial Sequence
  Probe
ctgtgctccggagttacctcgtttt

SEQ ID NO: 39828 - DNA, 21 bp, Artificial Sequence
  Probe
ctgttaaccgaaaagttggtg

SEQ ID NO: 39829 - DNA, 22 bp, Artificial Sequence
  Probe
ctgttaaccgaaagattggtgg

SEQ ID NO: 39830 - DNA, 21 bp, Artificial Sequence
  Probe
ctgttaaccgaaagcttggtg

SEQ ID NO: 39831 - DNA, 22 bp, Artificial Sequence
  Probe
ctgttaaccgaaagcttggtgg

SEQ ID NO: 39832 - DNA, 17 bp, Artificial Sequence
  Probe
ctgttaaccgaaaggtt

SEQ ID NO: 39833 - DNA, 18 bp, Artificial Sequence
  Probe
ctgttaaccgaaaggttg

SEQ ID NO: 39834 - DNA, 24 bp, Artificial Sequence
  Probe
ctgttaaccgaaaggttggtggtt

SEQ ID NO: 39835 - DNA, 34 bp, Artificial Sequence
  Probe
ctgttaaccgaaaggttggtggttcgagcccacc

SEQ ID NO: 39836 - DNA, 38 bp, Artificial Sequence
  Probe
ctgttaaccgaaaggttggtggttcgagcccacccagg

SEQ ID NO: 39837 - DNA, 45 bp, Artificial Sequence
  Probe
ctgttaaccgaaaggttggtggttcgagcccacccagggacgcct

SEQ ID NO: 39838 - DNA, 49 bp, Artificial Sequence
  Probe
ctgttaaccgaaaggttggtggttcgagcccacccagggacgcctcttt

SEQ ID NO: 39839 - DNA, 50 bp, Artificial Sequence
  Probe
ctgttaaccgaaaggttggtggttcgagcccacccagggacgcctctttg

SEQ ID NO: 39840 - DNA, 49 bp, Artificial Sequence
  Probe
ctgttaaccgaaaggttggtggttcgagcccacccagggacgcgctctc

SEQ ID NO: 39841 - DNA, 50 bp, Artificial Sequence
  Probe
ctgttaaccgaaaggttggtggttcgagcccacccagggacgcgctctcc

SEQ ID NO: 39842 - DNA, 45 bp, Artificial Sequence
  Probe
ctgttaaccgaaaggttggtggttcgagcccacccagggacgcgt

SEQ ID NO: 39843 - DNA, 49 bp, Artificial Sequence
  Probe
ctgttaaccgaaaggttggtggttcgagcccacccagggacgcgtggtg

SEQ ID NO: 39844 - DNA, 50 bp, Artificial Sequence
  Probe
ctgttaaccgaaaggttggtggttcgagcccacccagggacgcgtggtga

SEQ ID NO: 39845 - DNA, 45 bp, Artificial Sequence
  Probe
ctgttaaccgaaaggttggtggttcgagcccacccagggacgcta

SEQ ID NO: 39846 - DNA, 50 bp, Artificial Sequence
  Probe
ctgttaaccgaaaggttggtggttcgagcccacccagggacgctatgacc

SEQ ID NO: 39847 - DNA, 50 bp, Artificial Sequence
  Probe
ctgttaaccgaaaggttggtggttcgagcccacccagggacggctgaaat

SEQ ID NO: 39848 - DNA, 21 bp, Artificial Sequence
  Probe
ctgttaaccggaaagttggtg

SEQ ID NO: 39849 - DNA, 45 bp, Artificial Sequence; identical to SEQ ID NO: 5346
  Probe

SEQ ID NO: 39850 - DNA, 21 bp, Artificial Sequence
  Probe
ctgttaactgaaaggttagtg

SEQ ID NO: 39851 - DNA, 21 bp, Artificial Sequence
  Probe
ctgttaactgaaaggttggtg

SEQ ID NO: 39852 - DNA, 45 bp, Artificial Sequence; identical to SEQ ID NO: 5355
  Probe

SEQ ID NO: 39853 - DNA, 22 bp, Artificial Sequence
  Probe
cttaaacccccttatttctagg

SEQ ID NO: 39854 - DNA, 23 bp, Artificial Sequence
  Probe
cttaaacccccttatttctagga

SEQ ID NO: 39855 - DNA, 50 bp, Artificial Sequence; identical to SEQ ID NO: 849
  Probe

SEQ ID NO: 39856 - DNA, 18 bp, Artificial Sequence
  Probe
cttaacttgaccgctctg

SEQ ID NO: 39857 - DNA, 22 bp, Artificial Sequence
  Probe
cttaacttgaccgctctgagct

SEQ ID NO: 39858 - DNA, 18 bp, Artificial Sequence
  Probe
cttaatcccagggtcgtg

SEQ ID NO: 39859 - DNA, 18 bp, Artificial Sequence
  Probe
cttaatctcagggtcgtg

SEQ ID NO: 39860 - DNA, 20 bp, Artificial Sequence
  Probe
cttacacttaggagatttca

SEQ ID NO: 39861 - DNA, 21 bp, Artificial Sequence
  Probe
cttacacttaggagatttcaa

SEQ ID NO: 39862 - DNA, 42 bp, Artificial Sequence; identical to SEQ ID NO: 5371
  Probe

SEQ ID NO: 39863 - DNA, 43 bp, Artificial Sequence; identical to SEQ ID NO: 5372
  Probe

SEQ ID NO: 39864 - DNA, 44 bp, Artificial Sequence; identical to SEQ ID NO: 5373
  Probe

SEQ ID NO: 39865 - DNA, 50 bp, Artificial Sequence
  Probe
cttagcatgcacgaggtcctgggttcaatccccaatacctccaggttttg

SEQ ID NO: 39866 - DNA, 42 bp, Artificial Sequence
  Probe
cttagcatgcacgaggtcctgggttcgatccccagtacctcc

SEQ ID NO: 39867 - DNA, 50 bp, Artificial Sequence
  Probe
cttagcatgcatgaggtcccgggttcgatccccagcatctccagtgtttt

SEQ ID NO: 39868 - DNA, 50 bp, Artificial Sequence; identical to SEQ ID NO: 850
  Probe

SEQ ID NO: 39869 - DNA, 36 bp, Artificial Sequence; identical to SEQ ID NO: 5390
  Probe

SEQ ID NO: 39870 - DNA, 37 bp, Artificial Sequence; identical to SEQ ID NO: 5391
  Probe

SEQ ID NO: 39871 - DNA, 22 bp, Artificial Sequence
  Probe
cttaggatgcgagaggtcccgg

SEQ ID NO: 39872 - DNA, 23 bp, Artificial Sequence
  Probe
cttaggatgcgagaggtcccggg

SEQ ID NO: 39873 - DNA, 21 bp, Artificial Sequence
  Probe
cttagggtgcgagaggtcccg

SEQ ID NO: 39874 - DNA, 22 bp, Artificial Sequence
  Probe
cttagggtgcgagaggtcccgg

SEQ ID NO: 39875 - DNA, 23 bp, Artificial Sequence
  Probe
cttagggtgcgagaggtcccggg

SEQ ID NO: 39876 - DNA, 24 bp, Artificial Sequence
  Probe
cttagggtgcgagaggtcccgggt

SEQ ID NO: 39877 - DNA, 41 bp, Artificial Sequence
  Probe
cttagggtgcgagaggtcccgggttcaaatcccggacgagc

SEQ ID NO: 39878 - DNA, 50 bp, Artificial Sequence
  Probe
cttagggtgcgagaggtcccgggttcaaatcccggacgagcccggctttt

SEQ ID NO: 39879 - DNA, 31 bp, Artificial Sequence; identical to SEQ ID NO: 19739
  Probe

SEQ ID NO: 39880 - DNA, 20 bp, Artificial Sequence
  Probe
cttcaaacctgccggggctt

SEQ ID NO: 39881 - DNA, 23 bp, Artificial Sequence
  Probe
cttcaaacctgccggggcttctc

SEQ ID NO: 39882 - DNA, 31 bp, Artificial Sequence
  Probe
cttccaagcagttgacccgggttcgattccc

SEQ ID NO: 39883 - DNA, 44 bp, Artificial Sequence
  Probe
cttccaagcagttgacccgggttcgattcccggccaacgcaagt

SEQ ID NO: 39884 - DNA, 50 bp, Artificial Sequence
  Probe
cttccaagcagttgacccgggttcgattcccggccaacgcaagtcgtttt

SEQ ID NO: 39885 - DNA, 44 bp, Artificial Sequence; identical to SEQ ID NO: 19748
  Probe

SEQ ID NO: 39886 - DNA, 50 bp, Artificial Sequence
  Probe
cttccaagcagttgacccgggttcgattcccggccaacgcagtgtcagtt

SEQ ID NO: 39887 - DNA, 21 bp, Artificial Sequence
  Probe
cttccaattaactagttttga

SEQ ID NO: 39888 - DNA, 43 bp, Artificial Sequence; identical to SEQ ID NO: 5395
  Probe

SEQ ID NO: 39889 - DNA, 50 bp, Artificial Sequence
  Probe
cttcgcatgtatgaggtcccgggttcgatccccggcatctccaagttgtt

SEQ ID NO: 39890 - DNA, 20 bp, Artificial Sequence
  Probe
cttcgggtgcgagaggtccc

SEQ ID NO: 39891 - DNA, 21 bp, Artificial Sequence
  Probe
cttcgggtgcgagaggtcccg

SEQ ID NO: 39892 - DNA, 24 bp, Artificial Sequence
  Probe
cttcgggtgcgagaggtcccgggt

SEQ ID NO: 39893 - DNA, 41 bp, Artificial Sequence
  Probe
cttcgggtgcgagaggtcccgggttcaaatcccggacgagc

SEQ ID NO: 39894 - DNA, 46 bp, Artificial Sequence
  Probe
cttcgggtgcgagaggtcccgggttcaaatcccggacgagccctcc

SEQ ID NO: 39895 - DNA, 50 bp, Artificial Sequence
  Probe
cttcgggtgcgagaggtcccgggttcaaatcccggacgagccctccttta

SEQ ID NO: 39896 - DNA, 24 bp, Artificial Sequence
  Probe
cttctgacagagctcaattacttt

SEQ ID NO: 39897 - DNA, 18 bp, Artificial Sequence
  Probe
cttgaaatccaatggggt

SEQ ID NO: 39898 - DNA, 20 bp, Artificial Sequence
  Probe
cttgaaatccattggggtct

SEQ ID NO: 39899 - DNA, 27 bp, Artificial Sequence
  Probe
cttgaaatccattggggtctccccgcg

SEQ ID NO: 39900 - DNA, 29 bp, Artificial Sequence
  Probe
cttgaaatccattggggtctccccgcgca

SEQ ID NO: 39901 - DNA, 31 bp, Artificial Sequence
  Probe
cttgaaatccattggggtctccccgcgcagg

SEQ ID NO: 39902 - DNA, 27 bp, Artificial Sequence
  Probe
cttgaaatccattggggtttccccgcg

SEQ ID NO: 39903 - DNA, 29 bp, Artificial Sequence
  Probe
cttgaaatccattggggtttccccgcgca

SEQ ID NO: 39904 - DNA, 30 bp, Artificial Sequence
  Probe
cttgaaatccattggggtttccccgcgcag

SEQ ID NO: 39905 - DNA, 31 bp, Artificial Sequence; identical to SEQ ID NO: 19754
  Probe

SEQ ID NO: 39906 - DNA, 22 bp, Artificial Sequence
  Probe
cttgtaaacaggagatcctggg

SEQ ID NO: 39907 - DNA, 21 bp, Artificial Sequence
  Probe
cttgtaaaccaggggtcgcga

SEQ ID NO: 39908 - DNA, 45 bp, Artificial Sequence
  Probe
cttgtaaaccaggggtcgcgagttcaaatctcgctggggcctcgg

SEQ ID NO: 39909 - DNA, 45 bp, Artificial Sequence
  Probe
cttgtaaaccaggggtcgcgagttcaattctcgctggggcctgtg

SEQ ID NO: 39910 - DNA, 50 bp, Artificial Sequence
  Probe
cttgtaaaccaggggtcgcgagttcaattctcgctggggcctgtgtgttt

SEQ ID NO: 39911 - DNA, 18 bp, Artificial Sequence
  Probe
ctttacacgcagaaggtc

SEQ ID NO: 39912 - DNA, 19 bp, Artificial Sequence
  Probe
ctttacacgcagaaggtcc

SEQ ID NO: 39913 - DNA, 20 bp, Artificial Sequence
  Probe
ctttacacgcagaaggtcct

SEQ ID NO: 39914 - DNA, 46 bp, Artificial Sequence
  Probe
ctttacacgcagaaggtcctgggttcaagccccagtggaaccatgg

SEQ ID NO: 39915 - DNA, 33 bp, Artificial Sequence
  Probe
ctttacacgcagaaggtcctgggttcgagcccc

SEQ ID NO: 39916 - DNA, 34 bp, Artificial Sequence
  Probe
ctttacacgcagaaggtcctgggttcgagcccca

SEQ ID NO: 39917 - DNA, 35 bp, Artificial Sequence
  Probe
ctttacacgcagaaggtcctgggttcgagccccag

SEQ ID NO: 39918 - DNA, 45 bp, Artificial Sequence
  Probe
ctttacacgcagaaggtcctgggttcgagccccagtggaaccacg

SEQ ID NO: 39919 - DNA, 46 bp, Artificial Sequence; identical to SEQ ID NO: 5397
  Probe

SEQ ID NO: 39920 - DNA, 50 bp, Artificial Sequence
  Probe
ctttacacgcagaaggtcctgggttcgagccccagtggaaccacggcgtg

SEQ ID NO: 39921 - DNA, 46 bp, Artificial Sequence
  Probe
ctttacacgcagaaggtcctgggttcgagccccagtggaaccatag

SEQ ID NO: 39922 - DNA, 49 bp, Artificial Sequence
  Probe
ctttacacgcagaaggtcctgggttcgagccccagtggaaccatagccg

SEQ ID NO: 39923 - DNA, 50 bp, Artificial Sequence
  Probe
ctttacacgcagaaggtcctgggttcgagccccagtggaaccatagccgt

SEQ ID NO: 39924 - DNA, 49 bp, Artificial Sequence
  Probe
ctttacacgcagaaggtcctgggttcgagccccagtggaaccatgagat

SEQ ID NO: 39925 - DNA, 50 bp, Artificial Sequence
  Probe
ctttacacgcagaaggtcctgggttcgagccccagtggaaccatgagatg

SEQ ID NO: 39926 - DNA, 32 bp, Artificial Sequence
  Probe
ctttacagtcagaggttcaattcctcttctta

SEQ ID NO: 39927 - DNA, 35 bp, Artificial Sequence; identical to SEQ ID NO: 19762
  Probe

SEQ ID NO: 39928 - DNA, 38 bp, Artificial Sequence; identical to SEQ ID NO: 5400
  Probe

SEQ ID NO: 39929 - DNA, 50 bp, Artificial Sequence
  Probe
ctttcaagcagttaacgcgggttcgattcccgggtaacgaaacgtttttg

SEQ ID NO: 39930 - DNA, 41 bp, Artificial Sequence
  Probe
ctttcaccgccgcggcccgggttcgattcccggtcagggaa

SEQ ID NO: 39931 - DNA, 49 bp, Artificial Sequence
  Probe
ctttcaccgccgcggcccgggttcgattcccggtcagggaagtttgctt

SEQ ID NO: 39932 - DNA, 50 bp, Artificial Sequence
  Probe
ctttcaccgccgcggcccgggttcgattcccggtcagggaagtttgcttt

SEQ ID NO: 39933 - DNA, 44 bp, Artificial Sequence
  Probe
ctttcaccgccgcggcccgggttcgattcccggtcagggaattg

SEQ ID NO: 39934 - DNA, 49 bp, Artificial Sequence
  Probe
ctttcaccgccgcggcccgggttcgattcccggtcagggaattgtttta

SEQ ID NO: 39935 - DNA, 50 bp, Artificial Sequence
  Probe
ctttcaccgccgcggcccgggttcgattcccggtcagggaattgttttac

SEQ ID NO: 39936 - DNA, 22 bp, Artificial Sequence
  Probe
ctttgaatccagcgatccgagt

SEQ ID NO: 39937 - DNA, 24 bp, Artificial Sequence
  Probe
ctttgatagagtaaataataggag

SEQ ID NO: 39938 - DNA, 50 bp, Artificial Sequence; identical to SEQ ID NO: 5404
  Probe

SEQ ID NO: 39939 - DNA, 29 bp, Artificial Sequence
  Probe
ctttgcacgcgtgggttcgaatcccatcc

SEQ ID NO: 39940 - DNA, 31 bp, Artificial Sequence
  Probe
ctttgcacgcgtgggttcgaatcccatcctc

SEQ ID NO: 39941 - DNA, 34 bp, Artificial Sequence
  Probe
ctttgcacgcgtgggttcgaatcccatcctcgtc

SEQ ID NO: 39942 - DNA, 20 bp, Artificial Sequence
  Probe
ctttgcacgtatgaggcccc

SEQ ID NO: 39943 - DNA, 22 bp, Artificial Sequence
  Probe
ctttgcacgtatgaggccccgg

SEQ ID NO: 39944 - DNA, 46 bp, Artificial Sequence
  Probe
ctttgcacgtatgaggccccgggttcaatccccggcatctccagac

SEQ ID NO: 39945 - DNA, 50 bp, Artificial Sequence
  Probe
ctttgcacgtatgaggccccgggttcaatccccggcatctccagactttt

SEQ ID NO: 39946 - DNA, 21 bp, Artificial Sequence
  Probe
ctttgcatgtatgaggcctcg

SEQ ID NO: 39947 - DNA, 32 bp, Artificial Sequence; identical to SEQ ID NO: 19773
  Probe

SEQ ID NO: 39948 - DNA, 20 bp, Artificial Sequence
  Probe
ctttgggtgcgagaggtccc

SEQ ID NO: 39949 - DNA, 21 bp, Artificial Sequence
  Probe
ctttgggtgcgagaggtcccg

SEQ ID NO: 39950 - DNA, 41 bp, Artificial Sequence
  Probe
ctttgggtgcgagaggtcccgggttcaaatcccggacgagc

SEQ ID NO: 39951 - DNA, 46 bp, Artificial Sequence
  Probe
ctttgggtgcgagaggtcccgggttcaaatcccggacgagccccct

SEQ ID NO: 39952 - DNA, 50 bp, Artificial Sequence
  Probe
ctttgggtgcgagaggtcccgggttcaaatcccggacgagcccgcttttt

SEQ ID NO: 39953 - DNA, 50 bp, Artificial Sequence; identical to SEQ ID NO: 5408
  Probe

SEQ ID NO: 39954 - DNA, 21 bp, Artificial Sequence
  Probe
cttttaatctgagggtccagg

SEQ ID NO: 39955 - DNA, 23 bp, Artificial Sequence
  Probe
cttttaatctgagggtccagggt

SEQ ID NO: 39956 - DNA, 45 bp, Artificial Sequence
  Probe
cttttaatctgagggtccagggttcaagtccctgttcaggcgaac

SEQ ID NO: 39957 - DNA, 45 bp, Artificial Sequence
  Probe
cttttaatctgagggtccagggttcaagtccctgttcgggcggca

SEQ ID NO: 39958 - DNA, 50 bp, Artificial Sequence
  Probe
cttttaatctgagggtccagggttcaagtccctgttcgggcggtatcttt

SEQ ID NO: 39959 - DNA, 23 bp, Artificial Sequence
  Probe
ctttttcaccccgctgttgctct

SEQ ID NO: 39960 - DNA, 28 bp, Artificial Sequence
  Probe
gaaaaagtcatggaggccatggggttgg

SEQ ID NO: 39961 - DNA, 30 bp, Artificial Sequence; identical to SEQ ID NO: 13310
  Probe

SEQ ID NO: 39962 - DNA, 41 bp, Artificial Sequence; identical to SEQ ID NO: 5428
  Probe

SEQ ID NO: 39963 - DNA, 42 bp, Artificial Sequence; identical to SEQ ID NO: 5429
  Probe

SEQ ID NO: 39964 - DNA, 43 bp, Artificial Sequence; identical to SEQ ID NO: 19815
  Probe

SEQ ID NO: 39965 - DNA, 34 bp, Artificial Sequence; identical to SEQ ID NO: 19838
  Probe

SEQ ID NO: 39966 - DNA, 26 bp, Artificial Sequence
  Probe
gaaccaacacctctttacagtgaaat

SEQ ID NO: 39967 - DNA, 45 bp, Artificial Sequence; identical to SEQ ID NO: 5469
  Probe

SEQ ID NO: 39968 - DNA, 50 bp, Artificial Sequence; identical to SEQ ID NO: 5472
  Probe

SEQ ID NO: 39969 - DNA, 32 bp, Artificial Sequence; identical to SEQ ID NO: 5480
  Probe

SEQ ID NO: 39970 - DNA, 33 bp, Artificial Sequence; identical to SEQ ID NO: 5481
  Probe

SEQ ID NO: 39971 - DNA, 34 bp, Artificial Sequence; identical to SEQ ID NO: 5482
  Probe

SEQ ID NO: 39972 - DNA, 41 bp, Artificial Sequence; identical to SEQ ID NO: 19895
  Probe

SEQ ID NO: 39973 - DNA, 42 bp, Artificial Sequence; identical to SEQ ID NO: 19896
  Probe

SEQ ID NO: 39974 - DNA, 50 bp, Artificial Sequence
  Probe
gaagagcccggatagctcagtcggtagagcatcagacttttaatctgagg

SEQ ID NO: 39975 - DNA, 17 bp, Artificial Sequence
  Probe
gaagatcgcgggttcga

SEQ ID NO: 39976 - DNA, 29 bp, Artificial Sequence
  Probe
gaagattgagggttcgagtcccttcgtgg

SEQ ID NO: 39977 - DNA, 30 bp, Artificial Sequence; identical to SEQ ID NO: 890
  Probe

SEQ ID NO: 39978 - DNA, 31 bp, Artificial Sequence; identical to SEQ ID NO: 19909
  Probe

SEQ ID NO: 39979 - DNA, 38 bp, Artificial Sequence
  Probe
gaagattgagggttcgagtcccttcgtggtcgtcgttt

SEQ ID NO: 39980 - DNA, 35 bp, Artificial Sequence; identical to SEQ ID NO: 5490
  Probe

SEQ ID NO: 39981 - DNA, 50 bp, Artificial Sequence
  Probe
gaagattgagggttcgagtcccttcgtggtcgttgccatgttaacgtttt

SEQ ID NO: 39982 - DNA, 30 bp, Artificial Sequence; identical to SEQ ID NO: 5497
  Probe

SEQ ID NO: 39983 - DNA, 50 bp, Artificial Sequence; identical to SEQ ID NO: 5504
  Probe

SEQ ID NO: 39984 - DNA, 34 bp, Artificial Sequence
  Probe
gaagcccggctagctcagtcggtagagcatggga

SEQ ID NO: 39985 - DNA, 18 bp, Artificial Sequence
  Probe
gaagcgggtgctcttatt

SEQ ID NO: 39986 - DNA, 19 bp, Artificial Sequence
  Probe
gaagcgggtgctcttattt

SEQ ID NO: 39987 - DNA, 20 bp, Artificial Sequence
  Probe
gaagcgggtgctcttatttt

SEQ ID NO: 39988 - DNA, 21 bp, Artificial Sequence
  Probe
gaagcgggtgctcttattttt

SEQ ID NO: 39989 - DNA, 22 bp, Artificial Sequence
  Probe
gaagcgggtgctcttatttttt

SEQ ID NO: 39990 - DNA, 31 bp, Artificial Sequence
  Probe
gaagcgtgctgggcccataacccagaggtcg

SEQ ID NO: 39991 - DNA, 34 bp, Artificial Sequence
  Probe
gaagcgtgctgggcccataacccagaggtcgatg

SEQ ID NO: 39992 - DNA, 45 bp, Artificial Sequence
  Probe
gaaggcattcaaaggttccgggttcgagtcccggcggagtcgtaa

SEQ ID NO: 39993 - DNA, 30 bp, Artificial Sequence; identical to SEQ ID NO: 5510
  Probe

SEQ ID NO: 39994 - DNA, 31 bp, Artificial Sequence; identical to SEQ ID NO: 891
  Probe

SEQ ID NO: 39995 - DNA, 32 bp, Artificial Sequence; identical to SEQ ID NO: 5511
  Probe

SEQ ID NO: 39996 - DNA, 35 bp, Artificial Sequence; identical to SEQ ID NO: 5513
  Probe

SEQ ID NO: 39997 - DNA, 35 bp, Artificial Sequence
  Probe
gaatccagcgatccgagttcaaatctcggtggaac

SEQ ID NO: 39998 - DNA, 35 bp, Artificial Sequence
  Probe
gaatccagcgatccgagttcaagtctcggtggaac

SEQ ID NO: 39999 - DNA, 36 bp, Artificial Sequence
  Probe
gaatccagcgatccgagttcaagtctcggtggaacc

SEQ ID NO: 40000 - DNA, 33 bp, Artificial Sequence; identical to SEQ ID NO: 5540
  Probe

SEQ ID NO: 40001 - DNA, 50 bp, Artificial Sequence; identical to SEQ ID NO: 5541
  Probe

SEQ ID NO: 40002 - DNA, 50 bp, Artificial Sequence
  Probe
gaattctcgcctgccacgcgggaggcccgggttcgattcccggccaatgc

SEQ ID NO: 40003 - DNA, 50 bp, Artificial Sequence
  Probe
gaattctcgcctgccacgcgggaggcccgggttcgattcccggcccatgc

SEQ ID NO: 40004 - DNA, 46 bp, Artificial Sequence; identical to SEQ ID NO: 5545
  Probe

SEQ ID NO: 40005 - DNA, 31 bp, Artificial Sequence; identical to SEQ ID NO: 903
  Probe

SEQ ID NO: 40006 - DNA, 32 bp, Artificial Sequence; identical to SEQ ID NO: 5551
  Probe

SEQ ID NO: 40007 - DNA, 34 bp, Artificial Sequence; identical to SEQ ID NO: 5553
  Probe

SEQ ID NO: 40008 - DNA, 28 bp, Artificial Sequence
  Probe
gacagtagcattggtggttcagtggtag

SEQ ID NO: 40009 - DNA, 36 bp, Artificial Sequence; identical to SEQ ID NO: 20046
  Probe

SEQ ID NO: 40010 - DNA, 32 bp, Artificial Sequence; identical to SEQ ID NO: 905
  Probe

SEQ ID NO: 40011 - DNA, 33 bp, Artificial Sequence; identical to SEQ ID NO: 906
  Probe

SEQ ID NO: 40012 - DNA, 35 bp, Artificial Sequence; identical to SEQ ID NO: 908
  Probe

SEQ ID NO: 40013 - DNA, 36 bp, Artificial Sequence; identical to SEQ ID NO: 909
  Probe

SEQ ID NO: 40014 - DNA, 26 bp, Artificial Sequence
  Probe
gacccgggttcgattcccggccaacg

SEQ ID NO: 40015 - DNA, 27 bp, Artificial Sequence
  Probe
gacccgggttcgattcccggccaacgc

SEQ ID NO: 40016 - DNA, 31 bp, Artificial Sequence; identical to SEQ ID NO: 5567
  Probe

SEQ ID NO: 40017 - DNA, 31 bp, Artificial Sequence; identical to SEQ ID NO: 5568
  Probe

SEQ ID NO: 40018 - DNA, 28 bp, Artificial Sequence
  Probe
gacccttttggatgttcgcaaccccttt

SEQ ID NO: 40019 - DNA, 30 bp, Artificial Sequence; identical to SEQ ID NO: 10101
  Probe

SEQ ID NO: 40020 - DNA, 28 bp, Artificial Sequence
  Probe
gaccggggttcaattccccgacggggag

SEQ ID NO: 40021 - DNA, 25 bp, Artificial Sequence
  Probe
gaccggggttcgattccccgacggg

SEQ ID NO: 40022 - DNA, 27 bp, Artificial Sequence
  Probe
gaccggggttcgattccccgacgggga

SEQ ID NO: 40023 - DNA, 31 bp, Artificial Sequence; identical to SEQ ID NO: 5580
  Probe

SEQ ID NO: 40024 - DNA, 30 bp, Artificial Sequence
  Probe
gacgagctagctcagtcggtagagcatggg

SEQ ID NO: 40025 - DNA, 31 bp, Artificial Sequence
  Probe
gacgagctagctcagtcggtagagcatggga

SEQ ID NO: 40026 - DNA, 30 bp, Artificial Sequence; identical to SEQ ID NO: 10127
  Probe

SEQ ID NO: 40027 - DNA, 50 bp, Artificial Sequence
  Probe
gacgggccgcgtggcctaatggataaggcgtctgacttcggatcagaaga

SEQ ID NO: 40028 - DNA, 22 bp, Artificial Sequence
  Probe
gacgggctcacatcaccccata

SEQ ID NO: 40029 - DNA, 26 bp, Artificial Sequence
  Probe
gacgggctcacatcaccccataaaca

SEQ ID NO: 40030 - DNA, 29 bp, Artificial Sequence
  Probe
gacgggctcacatcaccccataaacaaat

SEQ ID NO: 40031 - DNA, 25 bp, Artificial Sequence
  Probe
gactacaaaaaggattagactgaac

SEQ ID NO: 40032 - DNA, 26 bp, Artificial Sequence
  Probe
gactacaaaaaggattagactgaacc

SEQ ID NO: 40033 - DNA, 23 bp, Artificial Sequence
  Probe
gactacggatcagaagattccag

SEQ ID NO: 40034 - DNA, 24 bp, Artificial Sequence
  Probe
gactacggatcagaagattccagg

SEQ ID NO: 40035 - DNA, 31 bp, Artificial Sequence
  Probe
gactagaaatccattggggtctccccgcgca

SEQ ID NO: 40036 - DNA, 34 bp, Artificial Sequence
  Probe
gactagaaatccattggggtctccccgcgcaggt

SEQ ID NO: 40037 - DNA, 36 bp, Artificial Sequence; identical to SEQ ID NO: 5607
  Probe

SEQ ID NO: 40038 - DNA, 24 bp, Artificial Sequence
  Probe
gactccagatcagaaggttgcgtg

SEQ ID NO: 40039 - DNA, 34 bp, Artificial Sequence
  Probe
gactcgaaatccaatgggggttccccgcgcaggt

SEQ ID NO: 40040 - DNA, 18 bp, Artificial Sequence
  Probe
gactctgaatccagcgat

SEQ ID NO: 40041 - DNA, 19 bp, Artificial Sequence
  Probe
gactctgaatccagcgatc

SEQ ID NO: 40042 - DNA, 24 bp, Artificial Sequence
  Probe
gactctgaatccagcgatccgagt

SEQ ID NO: 40043 - DNA, 43 bp, Artificial Sequence
  Probe
gactctgaatccagcgatccgagttcaaatctcggtggaacct

SEQ ID NO: 40044 - DNA, 45 bp, Artificial Sequence
  Probe
gactctgaatccagcgatccgagttcaaatctcggtggaacctgc

SEQ ID NO: 40045 - DNA, 46 bp, Artificial Sequence; identical to SEQ ID NO: 20140
  Probe

SEQ ID NO: 40046 - DNA, 50 bp, Artificial Sequence
  Probe
gactctgaatccagcgatccgagttcaaatctcggtggaacctgcattgg

SEQ ID NO: 40047 - DNA, 49 bp, Artificial Sequence
  Probe
gactctgaatccagcgatccgagttcaaatctcggtggaacctttcata

SEQ ID NO: 40048 - DNA, 50 bp, Artificial Sequence
  Probe
gactctgaatccagcgatccgagttcaaatctcggtggaacctttcatat

SEQ ID NO: 40049 - DNA, 50 bp, Artificial Sequence
  Probe
gactctgaatccagcgatccgagttcaaatctcggtggaacctttcattt

SEQ ID NO: 40050 - DNA, 42 bp, Artificial Sequence
  Probe
gactctgaatccagcgatccgagttcaaatctcggtgggacc

SEQ ID NO: 40051 - DNA, 46 bp, Artificial Sequence
  Probe
gactctgaatccagcgatccgagttcaaatctcggtgggacccagt

SEQ ID NO: 40052 - DNA, 46 bp, Artificial Sequence
  Probe
gactctgaatccagcgatccgagttcaagtctcggtggaacctgct

SEQ ID NO: 40053 - DNA, 50 bp, Artificial Sequence
  Probe
gactctgaatccagcgatccgagttcaagtctcggtggaacctgctcgaa

SEQ ID NO: 40054 - DNA, 46 bp, Artificial Sequence
  Probe
gactctgaatccagcgatccgagttcgagtctcggtggaacctttg

SEQ ID NO: 40055 - DNA, 18 bp, Artificial Sequence
  Probe
gactcttaatctcagggt

SEQ ID NO: 40056 - DNA, 22 bp, Artificial Sequence
  Probe
gactcttaatctcagggtcgtg

SEQ ID NO: 40057 - DNA, 50 bp, Artificial Sequence
  Probe
gactcttaatctcagggtcgtgggttcgagccccacgttgggcgctgtgt

SEQ ID NO: 40058 - DNA, 23 bp, Artificial Sequence
  Probe
gactgaagatctaaaggtccctg

SEQ ID NO: 40059 - DNA, 24 bp, Artificial Sequence
  Probe
gactgaagatctaaaggtccctgg

SEQ ID NO: 40060 - DNA, 31 bp, Artificial Sequence
  Probe
gacttgaaatccattggggtctccccgcgca

SEQ ID NO: 40061 - DNA, 34 bp, Artificial Sequence
  Probe
gacttgaaatccattggggtctccccgcgcaggt

SEQ ID NO: 40062 - DNA, 41 bp, Artificial Sequence
  Probe
gactttgaatccagcaatccgagttcgaatctcggtgggac

SEQ ID NO: 40063 - DNA, 46 bp, Artificial Sequence
  Probe
gactttgaatccagcaatccgagttcgaatctcggtgggacctttc

SEQ ID NO: 40064 - DNA, 20 bp, Artificial Sequence
  Probe
gactttgaatccagcgatcc

SEQ ID NO: 40065 - DNA, 46 bp, Artificial Sequence; identical to SEQ ID NO: 20141
  Probe

SEQ ID NO: 40066 - DNA, 21 bp, Artificial Sequence
  Probe
gagaaagctcacaagaactgc

SEQ ID NO: 40067 - DNA, 28 bp, Artificial Sequence
  Probe
gagaaagctcacaagaactgctaactca

SEQ ID NO: 40068 - DNA, 29 bp, Artificial Sequence
  Probe
gagaaagctcacaagaactgctaactcat

SEQ ID NO: 40069 - DNA, 31 bp, Artificial Sequence; identical to SEQ ID NO: 933
  Probe

SEQ ID NO: 40070 - DNA, 32 bp, Artificial Sequence; identical to SEQ ID NO: 934
  Probe

SEQ ID NO: 40071 - DNA, 33 bp, Artificial Sequence; identical to SEQ ID NO: 935
  Probe

SEQ ID NO: 40072 - DNA, 34 bp, Artificial Sequence; identical to SEQ ID NO: 936
  Probe

SEQ ID NO: 40073 - DNA, 35 bp, Artificial Sequence; identical to SEQ ID NO: 937
  Probe

SEQ ID NO: 40074 - DNA, 37 bp, Artificial Sequence; identical to SEQ ID NO: 939
  Probe

SEQ ID NO: 40075 - DNA, 28 bp, Artificial Sequence
  Probe
gagaaccaacacctctttacagtgaaat

SEQ ID NO: 40076 - DNA, 50 bp, Artificial Sequence
  Probe
gagacagcagagtggcgcagcggaagcgtgctgggcccataacccagagg

SEQ ID NO: 40077 - DNA, 30 bp, Artificial Sequence; identical to SEQ ID NO: 20156
  Probe

SEQ ID NO: 40078 - DNA, 28 bp, Artificial Sequence
  Probe
gagaccggggttcaattccccgacgggg

SEQ ID NO: 40079 - DNA, 24 bp, Artificial Sequence
  Probe
gagaccggggttcgattccccgac

SEQ ID NO: 40080 - DNA, 33 bp, Artificial Sequence; identical to SEQ ID NO: 5626
  Probe

SEQ ID NO: 40081 - DNA, 17 bp, Artificial Sequence
  Probe
gagagcgctcggttttt

SEQ ID NO: 40082 - DNA, 30 bp, Artificial Sequence; identical to SEQ ID NO: 20187
  Probe

SEQ ID NO: 40083 - DNA, 31 bp, Artificial Sequence; identical to SEQ ID NO: 20188
  Probe

SEQ ID NO: 40084 - DNA, 28 bp, Artificial Sequence
  Probe
gagatcctgggttcgaatcccagcggtg

SEQ ID NO: 40085 - DNA, 34 bp, Artificial Sequence
  Probe
gagatcctgggttcgaatcccagcggtgccttta

SEQ ID NO: 40086 - DNA, 30 bp, Artificial Sequence
  Probe
gagatcctgggttcgactcccagcggggcc

SEQ ID NO: 40087 - DNA, 34 bp, Artificial Sequence
  Probe
gagatcctgggttcgactcccagcggggccttgg

SEQ ID NO: 40088 - DNA, 29 bp, Artificial Sequence
  Probe
gagatgaaaacctttttccaaggacaaat

SEQ ID NO: 40089 - DNA, 19 bp, Artificial Sequence
  Probe
gagatgttacctagcgttt

SEQ ID NO: 40090 - DNA, 20 bp, Artificial Sequence
  Probe
gagatgttacctagcgtttt

SEQ ID NO: 40091 - DNA, 29 bp, Artificial Sequence
  Probe
gagatgttacctagcgttttgtgagccag

SEQ ID NO: 40092 - DNA, 28 bp, Artificial Sequence
  Probe
gagatttcaacttaacttgaccgctctg

SEQ ID NO: 40093 - DNA, 29 bp, Artificial Sequence
  Probe
gagatttcaacttaacttgaccgctctga

SEQ ID NO: 40094 - DNA, 32 bp, Artificial Sequence; identical to SEQ ID NO: 5643
  Probe

SEQ ID NO: 40095 - DNA, 50 bp, Artificial Sequence
  Probe
gagcaatgccgaggttgtgagttcgagcctcacctggagcaagacccttt

SEQ ID NO: 40096 - DNA, 50 bp, Artificial Sequence; identical to SEQ ID NO: 20232
  Probe

SEQ ID NO: 40097 - DNA, 37 bp, Artificial Sequence; identical to SEQ ID NO: 20245
  Probe

SEQ ID NO: 40098 - DNA, 38 bp, Artificial Sequence; identical to SEQ ID NO: 20246
  Probe

SEQ ID NO: 40099 - DNA, 25 bp, Artificial Sequence
  Probe
gagcccggtaatcgcataaaactta

SEQ ID NO: 40100 - DNA, 30 bp, Artificial Sequence; identical to SEQ ID NO: 960
  Probe

SEQ ID NO: 40101 - DNA, 31 bp, Artificial Sequence; identical to SEQ ID NO: 961
  Probe

SEQ ID NO: 40102 - DNA, 35 bp, Artificial Sequence; identical to SEQ ID NO: 5659
  Probe

SEQ ID NO: 40103 - DNA, 37 bp, Artificial Sequence
  Probe
gagcctggatagctcagtcggtagagcatcagacttt

SEQ ID NO: 40104 - DNA, 50 bp, Artificial Sequence
  Probe
gagcgttagactgaagatctaaaggtccctggttcgatcccgggtttcgg

SEQ ID NO: 40105 - DNA, 32 bp, Artificial Sequence; identical to SEQ ID NO: 20290
  Probe

SEQ ID NO: 40106 - DNA, 31 bp, Artificial Sequence
  Probe
gaggccccgggttcgatccccggcatctcca

SEQ ID NO: 40107 - DNA, 34 bp, Artificial Sequence; identical to SEQ ID NO: 20295
  Probe

SEQ ID NO: 40108 - DNA, 50 bp, Artificial Sequence
  Probe
gagggtccagggttcaagtccctgtccaggcgctaaaaatgcaactttta

SEQ ID NO: 40109 - DNA, 42 bp, Artificial Sequence; identical to SEQ ID NO: 20311
  Probe

SEQ ID NO: 40110 - DNA, 50 bp, Artificial Sequence
  Probe
gagggtccagggttcaagtccctgttcgggcggcatgtctttgcttttgg

SEQ ID NO: 40111 - DNA, 46 bp, Artificial Sequence
  Probe
gagggtccagggttcaagtccctgttcgggcgggagtggtggcttt

SEQ ID NO: 40112 - DNA, 50 bp, Artificial Sequence
  Probe
gagggtccagggttcaagtccctgttcgggcgggagtggtggcttttagt

SEQ ID NO: 40113 - DNA, 41 bp, Artificial Sequence; identical to SEQ ID NO: 20313
  Probe

SEQ ID NO: 40114 - DNA, 42 bp, Artificial Sequence; identical to SEQ ID NO: 31492
  Probe

SEQ ID NO: 40115 - DNA, 43 bp, Artificial Sequence; identical to SEQ ID NO: 31493
  Probe

SEQ ID NO: 40116 - DNA, 46 bp, Artificial Sequence
  Probe
gagggtctagggttcaagtccctgtccaggcgttgagtgtagtttt

SEQ ID NO: 40117 - DNA, 28 bp, Artificial Sequence
  Probe
gagggttctcaccttctctctccgattt

SEQ ID NO: 40118 - DNA, 29 bp, Artificial Sequence
  Probe
gagggttctcaccttctctctccgatttt

SEQ ID NO: 40119 - DNA, 30 bp, Artificial Sequence
  Probe
gaggtcccgggttcgatccccggcatctcc

SEQ ID NO: 40120 - DNA, 36 bp, Artificial Sequence; identical to SEQ ID NO: 972
  Probe

SEQ ID NO: 40121 - DNA, 38 bp, Artificial Sequence; identical to SEQ ID NO: 5681
  Probe

SEQ ID NO: 40122 - DNA, 50 bp, Artificial Sequence; identical to SEQ ID NO: 5686
  Probe

SEQ ID NO: 40123 - DNA, 50 bp, Artificial Sequence
  Probe
gagtgaagcattggactgtaaatctaaagacaggggttaggcctcttttt

SEQ ID NO: 40124 - DNA, 23 bp, Artificial Sequence
  Probe
gagttagcggggagtgatatatt

SEQ ID NO: 40125 - DNA, 24 bp, Artificial Sequence
  Probe
gagttagcggggagtgatatatta

SEQ ID NO: 40126 - DNA, 26 bp, Artificial Sequence
  Probe
gagttagcggggagtgatatattatt

SEQ ID NO: 40127 - DNA, 50 bp, Artificial Sequence; identical to SEQ ID NO: 973
  Probe

SEQ ID NO: 40128 - DNA, 43 bp, Artificial Sequence; identical to SEQ ID NO: 5713
  Probe

SEQ ID NO: 40129 - DNA, 45 bp, Artificial Sequence; identical to SEQ ID NO: 5715
  Probe

SEQ ID NO: 40130 - DNA, 21 bp, Artificial Sequence
  Probe
gatagctcagtcggtagagca

SEQ ID NO: 40131 - DNA, 30 bp, Artificial Sequence; identical to SEQ ID NO: 20401
  Probe

SEQ ID NO: 40132 - DNA, 20 bp, Artificial Sequence
  Probe
gatccccggcatctccattg

SEQ ID NO: 40133 - DNA, 32 bp, Artificial Sequence
  Probe
gatcctgggttcgactcccagcggggccttgg

SEQ ID NO: 40134 - DNA, 24 bp, Artificial Sequence
  Probe
gatcgaaaccatcctctgctaggt

SEQ ID NO: 40135 - DNA, 31 bp, Artificial Sequence
  Probe
gatcgaaaccatcctctgctatcggagtttt

SEQ ID NO: 40136 - DNA, 32 bp, Artificial Sequence
  Probe
gatcgaaaccatcctctgctatcggagttttt

SEQ ID NO: 40137 - DNA, 20 bp, Artificial Sequence
  Probe
gatcgtatagtggttagtac

SEQ ID NO: 40138 - DNA, 21 bp, Artificial Sequence
  Probe
gatcgtatagtggttagtact

SEQ ID NO: 40139 - DNA, 24 bp, Artificial Sequence
  Probe
gatcgtatagtggttagtactctg

SEQ ID NO: 40140 - DNA, 27 bp, Artificial Sequence
  Probe
gatgaaaacctttttccaaggacaaat

SEQ ID NO: 40141 - DNA, 30 bp, Artificial Sequence; identical to SEQ ID NO: 5730
  Probe

SEQ ID NO: 40142 - DNA, 31 bp, Artificial Sequence; identical to SEQ ID NO: 5731
  Probe

SEQ ID NO: 40143 - DNA, 30 bp, Artificial Sequence; identical to SEQ ID NO: 10204
  Probe

SEQ ID NO: 40144 - DNA, 34 bp, Artificial Sequence; identical to SEQ ID NO: 5739
  Probe

SEQ ID NO: 40145 - DNA, 17 bp, Artificial Sequence
  Probe
gattcccattcttgcga

SEQ ID NO: 40146 - DNA, 33 bp, Artificial Sequence
  Probe
gattcccattcttgcgacccgggttcgattccc

SEQ ID NO: 40147 - DNA, 38 bp, Artificial Sequence
  Probe
gattcccattcttgcgacccgggttcgattcccgggcg

SEQ ID NO: 40148 - DNA, 41 bp, Artificial Sequence
  Probe
gattcccattcttgcgacccgggttcgattcccgggcggcg

SEQ ID NO: 40149 - DNA, 45 bp, Artificial Sequence
  Probe
gattcccattcttgcgacccgggttcgattcccgggcggcgcact

SEQ ID NO: 40150 - DNA, 46 bp, Artificial Sequence; identical to SEQ ID NO: 20434
  Probe

SEQ ID NO: 40151 - DNA, 50 bp, Artificial Sequence
  Probe
gattcccattcttgcgacccgggttcgattcccgggcggcgcacttagtt

SEQ ID NO: 40152 - DNA, 46 bp, Artificial Sequence
  Probe
gattcccattcttgcgacccgggttcgattcccgggcggcgcatag

SEQ ID NO: 40153 - DNA, 50 bp, Artificial Sequence
  Probe
gattcccattcttgcgacccgggttcgattcccgggcggcgcataggcgt

SEQ ID NO: 40154 - DNA, 50 bp, Artificial Sequence
  Probe
gattcctggttttcacccaggcggcccgggttcgactcccggtgtgggaa

SEQ ID NO: 40155 - DNA, 27 bp, Artificial Sequence
  Probe
gattcggcgctttcaccgccgcggccc

SEQ ID NO: 40156 - DNA, 29 bp, Artificial Sequence
  Probe
gattgaaacttttcgaaagtacgattact

SEQ ID NO: 40157 - DNA, 25 bp, Artificial Sequence
  Probe
gattgagggttcgagtcccttcgtg

SEQ ID NO: 40158 - DNA, 27 bp, Artificial Sequence
  Probe
gattgagggttcgagtcccttcgtggt

SEQ ID NO: 40159 - DNA, 28 bp, Artificial Sequence
  Probe
gattgagggttcgagtcccttcgtggtc

SEQ ID NO: 40160 - DNA, 29 bp, Artificial Sequence
  Probe
gattgagggttcgagtcccttcgtggtcg

SEQ ID NO: 40161 - DNA, 32 bp, Artificial Sequence; identical to SEQ ID NO: 5746
  Probe

SEQ ID NO: 40162 - DNA, 35 bp, Artificial Sequence
  Probe
gattggtggttcgagcccacccagggacgcttatt

SEQ ID NO: 40163 - DNA, 32 bp, Artificial Sequence; identical to SEQ ID NO: 5751
  Probe

SEQ ID NO: 40164 - DNA, 33 bp, Artificial Sequence; identical to SEQ ID NO: 982
  Probe

SEQ ID NO: 40165 - DNA, 34 bp, Artificial Sequence; identical to SEQ ID NO: 983
  Probe

SEQ ID NO: 40166 - DNA, 35 bp, Artificial Sequence; identical to SEQ ID NO: 5752
  Probe

SEQ ID NO: 40167 - DNA, 46 bp, Artificial Sequence; identical to SEQ ID NO: 5757
  Probe

SEQ ID NO: 40168 - DNA, 20 bp, Artificial Sequence
  Probe
gatttaggctccagtctctt

SEQ ID NO: 40169 - DNA, 27 bp, Artificial Sequence
  Probe
gatttcaacttaacttgaccgctctga

SEQ ID NO: 40170 - DNA, 30 bp, Artificial Sequence; identical to SEQ ID NO: 5769
  Probe

SEQ ID NO: 40171 - DNA, 42 bp, Artificial Sequence; identical to SEQ ID NO: 5774
  Probe

SEQ ID NO: 40172 - DNA, 22 bp, Artificial Sequence
  Probe
gatttctgtaccttacacattt

SEQ ID NO: 40173 - DNA, 41 bp, Artificial Sequence; identical to SEQ ID NO: 5783
  Probe

SEQ ID NO: 40174 - DNA, 50 bp, Artificial Sequence; identical to SEQ ID NO: 5793
  Probe

SEQ ID NO: 40175 - DNA, 27 bp, Artificial Sequence
  Probe
gcaatggtggttcagtggtagaattct

SEQ ID NO: 40176 - DNA, 28 bp, Artificial Sequence
  Probe
gcaatggtggttcagtggtagaattctc

SEQ ID NO: 40177 - DNA, 29 bp, Artificial Sequence
  Probe
gcaatggtggttcagtggtagaattctcg

SEQ ID NO: 40178 - DNA, 30 bp, Artificial Sequence; identical to SEQ ID NO: 10262
  Probe

SEQ ID NO: 40179 - DNA, 33 bp, Artificial Sequence
  Probe
gcaatgtcgttagtctaggctgtcagctcttcc

SEQ ID NO: 40180 - DNA, 50 bp, Artificial Sequence; identical to SEQ ID NO: 5820
  Probe

SEQ ID NO: 40181 - DNA, 37 bp, Artificial Sequence; identical to SEQ ID NO: 20530
  Probe

SEQ ID NO: 40182 - DNA, 38 bp, Artificial Sequence; identical to SEQ ID NO: 5821
  Probe

SEQ ID NO: 40183 - DNA, 38 bp, Artificial Sequence; identical to SEQ ID NO: 20536
  Probe

SEQ ID NO: 40184 - DNA, 38 bp, Artificial Sequence; identical to SEQ ID NO: 20537
  Probe

SEQ ID NO: 40185 - DNA, 34 bp, Artificial Sequence
  Probe
gcacgaggtcctgggttcgatccccagtacctcc

SEQ ID NO: 40186 - DNA, 37 bp, Artificial Sequence; identical to SEQ ID NO: 20538
  Probe

SEQ ID NO: 40187 - DNA, 38 bp, Artificial Sequence; identical to SEQ ID NO: 20539
  Probe

SEQ ID NO: 40188 - DNA, 42 bp, Artificial Sequence; identical to SEQ ID NO: 20546
  Probe

SEQ ID NO: 40189 - DNA, 27 bp, Artificial Sequence
  Probe
gcactggtggttcagtggtagaattct

SEQ ID NO: 40190 - DNA, 28 bp, Artificial Sequence
  Probe
gcactggtggttcagtggtagaattctc

SEQ ID NO: 40191 - DNA, 30 bp, Artificial Sequence; identical to SEQ ID NO: 8615
  Probe

SEQ ID NO: 40192 - DNA, 32 bp, Artificial Sequence; identical to SEQ ID NO: 991
  Probe

SEQ ID NO: 40193 - DNA, 34 bp, Artificial Sequence; identical to SEQ ID NO: 13440
  Probe

SEQ ID NO: 40194 - DNA, 36 bp, Artificial Sequence; identical to SEQ ID NO: 993
  Probe

SEQ ID NO: 40195 - DNA, 38 bp, Artificial Sequence; identical to SEQ ID NO: 5831
  Probe

SEQ ID NO: 40196 - DNA, 38 bp, Artificial Sequence; identical to SEQ ID NO: 5832
  Probe

SEQ ID NO: 40197 - DNA, 50 bp, Artificial Sequence
  Probe
gcagagtggcgcagcggaagcgtgctgggcccataacccagaggtcgatg

SEQ ID NO: 40198 - DNA, 28 bp, Artificial Sequence
  Probe
gcagagtggggttttgcagtccttagct

SEQ ID NO: 40199 - DNA, 36 bp, Artificial Sequence; identical to SEQ ID NO: 5839
  Probe

SEQ ID NO: 40200 - DNA, 36 bp, Artificial Sequence; identical to SEQ ID NO: 5840
  Probe

SEQ ID NO: 40201 - DNA, 32 bp, Artificial Sequence; identical to SEQ ID NO: 20614
  Probe

SEQ ID NO: 40202 - DNA, 27 bp, Artificial Sequence
  Probe
gcataggtggttcagtggtagaattct

SEQ ID NO: 40203 - DNA, 29 bp, Artificial Sequence
  Probe
gcataggtggttcagtggtagaattcttg

SEQ ID NO: 40204 - DNA, 30 bp, Artificial Sequence; identical to SEQ ID NO: 10307
  Probe

SEQ ID NO: 40205 - DNA, 35 bp, Artificial Sequence; identical to SEQ ID NO: 13456
  Probe

SEQ ID NO: 40206 - DNA, 38 bp, Artificial Sequence; identical to SEQ ID NO: 5861
  Probe

SEQ ID NO: 40207 - DNA, 28 bp, Artificial Sequence
  Probe
gcatgggtgattcagtggtagaattttc

SEQ ID NO: 40208 - DNA, 18 bp, Artificial Sequence
  Probe
gcatgggtggttcagtgg

SEQ ID NO: 40209 - DNA, 19 bp, Artificial Sequence
  Probe
gcatgggtggttcagtggt

SEQ ID NO: 40210 - DNA, 20 bp, Artificial Sequence
  Probe
gcatgggtggttcagtggta

SEQ ID NO: 40211 - DNA, 21 bp, Artificial Sequence
  Probe
gcatgggtggttcagtggtag

SEQ ID NO: 40212 - DNA, 22 bp, Artificial Sequence
  Probe
gcatgggtggttcagtggtaga

SEQ ID NO: 40213 - DNA, 23 bp, Artificial Sequence
  Probe
gcatgggtggttcagtggtagaa

SEQ ID NO: 40214 - DNA, 24 bp, Artificial Sequence
  Probe
gcatgggtggttcagtggtagaat

SEQ ID NO: 40215 - DNA, 25 bp, Artificial Sequence
  Probe
gcatgggtggttcagtggtagaatt

SEQ ID NO: 40216 - DNA, 26 bp, Artificial Sequence
  Probe
gcatgggtggttcagtggtagaattc

SEQ ID NO: 40217 - DNA, 27 bp, Artificial Sequence
  Probe
gcatgggtggttcagtggtagaattct

SEQ ID NO: 40218 - DNA, 36 bp, Artificial Sequence; identical to SEQ ID NO: 1008
  Probe

SEQ ID NO: 40219 - DNA, 37 bp, Artificial Sequence; identical to SEQ ID NO: 5870
  Probe

SEQ ID NO: 40220 - DNA, 38 bp, Artificial Sequence; identical to SEQ ID NO: 1009
  Probe

SEQ ID NO: 40221 - DNA, 41 bp, Artificial Sequence; identical to SEQ ID NO: 13469
  Probe

SEQ ID NO: 40222 - DNA, 42 bp, Artificial Sequence; identical to SEQ ID NO: 20652
  Probe

SEQ ID NO: 40223 - DNA, 44 bp, Artificial Sequence
  Probe
gcatgggtggttcagtggtagaattctcgcctgccacgcgggag

SEQ ID NO: 40224 - DNA, 45 bp, Artificial Sequence
  Probe
gcatgggtggttcagtggtagaattctcgcctgccacgcgggagg

SEQ ID NO: 40225 - DNA, 46 bp, Artificial Sequence; identical to SEQ ID NO: 20654
  Probe

SEQ ID NO: 40226 - DNA, 42 bp, Artificial Sequence
  Probe
gcatgtacgaggtccctggttcaatccctggtacctccattt

SEQ ID NO: 40227 - DNA, 34 bp, Artificial Sequence; identical to SEQ ID NO: 1011
  Probe

SEQ ID NO: 40228 - DNA, 50 bp, Artificial Sequence; identical to SEQ ID NO: 5882
  Probe

SEQ ID NO: 40229 - DNA, 28 bp, Artificial Sequence
  Probe
gcattggtggttcaatggtagaattctc

SEQ ID NO: 40230 - DNA, 30 bp, Artificial Sequence; identical to SEQ ID NO: 10328
  Probe

SEQ ID NO: 40231 - DNA, 18 bp, Artificial Sequence
  Probe
gcattggtggttcagtgg

SEQ ID NO: 40232 - DNA, 19 bp, Artificial Sequence
  Probe
gcattggtggttcagtggt

SEQ ID NO: 40233 - DNA, 20 bp, Artificial Sequence
  Probe
gcattggtggttcagtggta

SEQ ID NO: 40234 - DNA, 21 bp, Artificial Sequence
  Probe
gcattggtggttcagtggtag

SEQ ID NO: 40235 - DNA, 22 bp, Artificial Sequence
  Probe
gcattggtggttcagtggtaga

SEQ ID NO: 40236 - DNA, 23 bp, Artificial Sequence
  Probe
gcattggtggttcagtggtagaa

SEQ ID NO: 40237 - DNA, 24 bp, Artificial Sequence
  Probe
gcattggtggttcagtggtagaat

SEQ ID NO: 40238 - DNA, 25 bp, Artificial Sequence
  Probe
gcattggtggttcagtggtagaatt

SEQ ID NO: 40239 - DNA, 26 bp, Artificial Sequence
  Probe
gcattggtggttcagtggtagaattc

SEQ ID NO: 40240 - DNA, 27 bp, Artificial Sequence
  Probe
gcattggtggttcagtggtagaattct

SEQ ID NO: 40241 - DNA, 28 bp, Artificial Sequence
  Probe
gcattggtggttcagtggtagaattctc

SEQ ID NO: 40242 - DNA, 29 bp, Artificial Sequence
  Probe
gcattggtggttcagtggtagaattctcg

SEQ ID NO: 40243 - DNA, 30 bp, Artificial Sequence; identical to SEQ ID NO: 5900
  Probe

SEQ ID NO: 40244 - DNA, 31 bp, Artificial Sequence; identical to SEQ ID NO: 5901
  Probe

SEQ ID NO: 40245 - DNA, 32 bp, Artificial Sequence; identical to SEQ ID NO: 5902
  Probe

SEQ ID NO: 40246 - DNA, 33 bp, Artificial Sequence; identical to SEQ ID NO: 5903
  Probe

SEQ ID NO: 40247 - DNA, 34 bp, Artificial Sequence; identical to SEQ ID NO: 5904
  Probe

SEQ ID NO: 40248 - DNA, 35 bp, Artificial Sequence; identical to SEQ ID NO: 5905
  Probe

SEQ ID NO: 40249 - DNA, 36 bp, Artificial Sequence; identical to SEQ ID NO: 5906
  Probe

SEQ ID NO: 40250 - DNA, 37 bp, Artificial Sequence
  Probe
gcattggtggttcagtggtagaattctcgcctcccac

SEQ ID NO: 40251 - DNA, 41 bp, Artificial Sequence
  Probe
gcattggtggttcagtggtagaattctcgcctcccacgcgg

SEQ ID NO: 40252 - DNA, 42 bp, Artificial Sequence
  Probe
gcattggtggttcagtggtagaattctcgcctcccacgcggg

SEQ ID NO: 40253 - DNA, 45 bp, Artificial Sequence
  Probe
gcattggtggttcagtggtagaattctcgcctcccacgcgggaga

SEQ ID NO: 40254 - DNA, 33 bp, Artificial Sequence; identical to SEQ ID NO: 5908
  Probe

SEQ ID NO: 40255 - DNA, 34 bp, Artificial Sequence; identical to SEQ ID NO: 5909
  Probe

SEQ ID NO: 40256 - DNA, 35 bp, Artificial Sequence; identical to SEQ ID NO: 5910
  Probe

SEQ ID NO: 40257 - DNA, 36 bp, Artificial Sequence; identical to SEQ ID NO: 5911
  Probe

SEQ ID NO: 40258 - DNA, 41 bp, Artificial Sequence; identical to SEQ ID NO: 1017
  Probe

SEQ ID NO: 40259 - DNA, 43 bp, Artificial Sequence; identical to SEQ ID NO: 5914
  Probe

SEQ ID NO: 40260 - DNA, 44 bp, Artificial Sequence; identical to SEQ ID NO: 1018
  Probe

SEQ ID NO: 40261 - DNA, 45 bp, Artificial Sequence; identical to SEQ ID NO: 5915
  Probe

SEQ ID NO: 40262 - DNA, 37 bp, Artificial Sequence; identical to SEQ ID NO: 5919
  Probe

SEQ ID NO: 40263 - DNA, 25 bp, Artificial Sequence
  Probe
gccacacctcagaaggtctcacttt

SEQ ID NO: 40264 - DNA, 26 bp, Artificial Sequence
  Probe
gccacacctcagaaggtctcactttt

SEQ ID NO: 40265 - DNA, 36 bp, Artificial Sequence; identical to SEQ ID NO: 31798
  Probe

SEQ ID NO: 40266 - DNA, 37 bp, Artificial Sequence
  Probe
gccacgcgggaggcccgggttcgattcccggccaatg

SEQ ID NO: 40267 - DNA, 38 bp, Artificial Sequence
  Probe
gccacgcgggaggcccgggttcgattcccggccaatgc

SEQ ID NO: 40268 - DNA, 42 bp, Artificial Sequence; identical to SEQ ID NO: 5926
  Probe

SEQ ID NO: 40269 - DNA, 42 bp, Artificial Sequence; identical to SEQ ID NO: 20722
  Probe

SEQ ID NO: 40270 - DNA, 36 bp, Artificial Sequence
  Probe
gccacgcgggaggcccgggttcgattcccggcccat

SEQ ID NO: 40271 - DNA, 37 bp, Artificial Sequence
  Probe
gccacgcgggaggcccgggttcgattcccggcccatg

SEQ ID NO: 40272 - DNA, 38 bp, Artificial Sequence; identical to SEQ ID NO: 20731
  Probe

SEQ ID NO: 40273 - DNA, 30 bp, Artificial Sequence
  Probe
gcccagctagctcagtcggtagagcataag

SEQ ID NO: 40274 - DNA, 31 bp, Artificial Sequence; identical to SEQ ID NO: 20745
  Probe

SEQ ID NO: 40275 - DNA, 28 bp, Artificial Sequence
  Probe
gcccagctagctcagtcggtagagcatg

SEQ ID NO: 40276 - DNA, 29 bp, Artificial Sequence
  Probe
gcccagctagctcagtcggtagagcatga

SEQ ID NO: 40277 - DNA, 30 bp, Artificial Sequence; identical to SEQ ID NO: 10349
  Probe

SEQ ID NO: 40278 - DNA, 31 bp, Artificial Sequence; identical to SEQ ID NO: 5936
  Probe

SEQ ID NO: 40279 - DNA, 32 bp, Artificial Sequence; identical to SEQ ID NO: 5937
  Probe

SEQ ID NO: 40280 - DNA, 33 bp, Artificial Sequence; identical to SEQ ID NO: 5938
  Probe

SEQ ID NO: 40281 - DNA, 34 bp, Artificial Sequence; identical to SEQ ID NO: 5939
  Probe

SEQ ID NO: 40282 - DNA, 21 bp, Artificial Sequence
  Probe
gcccataacccagaggtcgat

SEQ ID NO: 40283 - DNA, 23 bp, Artificial Sequence
  Probe
gcccataacccagaggtcgatgg

SEQ ID NO: 40284 - DNA, 46 bp, Artificial Sequence; identical to SEQ ID NO: 5942
  Probe

SEQ ID NO: 40285 - DNA, 31 bp, Artificial Sequence
  Probe
gccccagtggcctaatggataaggcactggc

SEQ ID NO: 40286 - DNA, 50 bp, Artificial Sequence
  Probe
gccccagtggcctaatggataaggcactggcctcctaagccagggattgt

SEQ ID NO: 40287 - DNA, 31 bp, Artificial Sequence; identical to SEQ ID NO: 20768
  Probe

SEQ ID NO: 40288 - DNA, 50 bp, Artificial Sequence
  Probe
gccccagtggcctaatggataaggcattggcctcctaagccagggattgt

SEQ ID NO: 40289 - DNA, 20 bp, Artificial Sequence
  Probe
gcccccatgtctaacaacat

SEQ ID NO: 40290 - DNA, 21 bp, Artificial Sequence
  Probe
gcccccatgtctaacaacatg

SEQ ID NO: 40291 - DNA, 22 bp, Artificial Sequence
  Probe
gcccccatgtctaacaacatgg

SEQ ID NO: 40292 - DNA, 23 bp, Artificial Sequence
  Probe
gcccccatgtctaacaacatggc

SEQ ID NO: 40293 - DNA, 24 bp, Artificial Sequence
  Probe
gcccccatgtctaacaacatggct

SEQ ID NO: 40294 - DNA, 25 bp, Artificial Sequence
  Probe
gcccccatgtctaacaacatggctt

SEQ ID NO: 40295 - DNA, 26 bp, Artificial Sequence
  Probe
gcccccatgtctaacaacatggcttt

SEQ ID NO: 40296 - DNA, 27 bp, Artificial Sequence
  Probe
gcccccatgtctaacaacatggctttc

SEQ ID NO: 40297 - DNA, 28 bp, Artificial Sequence
  Probe
gcccccatgtctaacaacatggctttct

SEQ ID NO: 40298 - DNA, 29 bp, Artificial Sequence
  Probe
gcccccatgtctaacaacatggctttctc

SEQ ID NO: 40299 - DNA, 30 bp, Artificial Sequence; identical to SEQ ID NO: 5966
  Probe

SEQ ID NO: 40300 - DNA, 31 bp, Artificial Sequence; identical to SEQ ID NO: 5967
  Probe

SEQ ID NO: 40301 - DNA, 32 bp, Artificial Sequence; identical to SEQ ID NO: 5968
  Probe

SEQ ID NO: 40302 - DNA, 33 bp, Artificial Sequence; identical to SEQ ID NO: 5969
  Probe

SEQ ID NO: 40303 - DNA, 34 bp, Artificial Sequence; identical to SEQ ID NO: 5970
  Probe

SEQ ID NO: 40304 - DNA, 35 bp, Artificial Sequence; identical to SEQ ID NO: 5971
  Probe

SEQ ID NO: 40305 - DNA, 36 bp, Artificial Sequence; identical to SEQ ID NO: 5972
  Probe

SEQ ID NO: 40306 - DNA, 37 bp, Artificial Sequence; identical to SEQ ID NO: 5973
  Probe

SEQ ID NO: 40307 - DNA, 38 bp, Artificial Sequence; identical to SEQ ID NO: 5974
  Probe

SEQ ID NO: 40308 - DNA, 41 bp, Artificial Sequence; identical to SEQ ID NO: 5977
  Probe

SEQ ID NO: 40309 - DNA, 31 bp, Artificial Sequence; identical to SEQ ID NO: 20801
  Probe

SEQ ID NO: 40310 - DNA, 27 bp, Artificial Sequence
  Probe
gccccgggttcgatccccggcatctcc

SEQ ID NO: 40311 - DNA, 31 bp, Artificial Sequence; identical to SEQ ID NO: 5979
  Probe

SEQ ID NO: 40312 - DNA, 29 bp, Artificial Sequence
  Probe
gccccggtggcctaatggataaggcattg

SEQ ID NO: 40313 - DNA, 28 bp, Artificial Sequence
  Probe
gcccctcatttacataaatattatacta

SEQ ID NO: 40314 - DNA, 31 bp, Artificial Sequence; identical to SEQ ID NO: 20807
  Probe

SEQ ID NO: 40315 - DNA, 23 bp, Artificial Sequence
  Probe
gcccggatagctcagtcggtaga

SEQ ID NO: 40316 - DNA, 37 bp, Artificial Sequence; identical to SEQ ID NO: 1045
  Probe

SEQ ID NO: 40317 - DNA, 39 bp, Artificial Sequence; identical to SEQ ID NO: 5988
  Probe

SEQ ID NO: 40318 - DNA, 50 bp, Artificial Sequence
  Probe
gcccggatagctcagtcggtagagcatcagacttttaatctgagggtccg

SEQ ID NO: 40319 - DNA, 30 bp, Artificial Sequence
  Probe
gcccggatagttcagttggtagagcatcag

SEQ ID NO: 40320 - DNA, 31 bp, Artificial Sequence; identical to SEQ ID NO: 20818
  Probe

SEQ ID NO: 40321 - DNA, 32 bp, Artificial Sequence; identical to SEQ ID NO: 5990
  Probe

SEQ ID NO: 40322 - DNA, 33 bp, Artificial Sequence; identical to SEQ ID NO: 5991
  Probe

SEQ ID NO: 40323 - DNA, 28 bp, Artificial Sequence
  Probe
gcccggctagctcagtcgatagagcatg

SEQ ID NO: 40324 - DNA, 29 bp, Artificial Sequence
  Probe
gcccggctagctcagtcgatagagcatga

SEQ ID NO: 40325 - DNA, 30 bp, Artificial Sequence; identical to SEQ ID NO: 20824
  Probe

SEQ ID NO: 40326 - DNA, 31 bp, Artificial Sequence; identical to SEQ ID NO: 1050
  Probe

SEQ ID NO: 40327 - DNA, 50 bp, Artificial Sequence
  Probe
gcccggctagctcagtcgatagagcatgagactcttaatctcagggtcgt

SEQ ID NO: 40328 - DNA, 19 bp, Artificial Sequence
  Probe
gcccggctagctcagtcgg

SEQ ID NO: 40329 - DNA, 21 bp, Artificial Sequence
  Probe
gcccggctagctcagtcggta

SEQ ID NO: 40330 - DNA, 33 bp, Artificial Sequence; identical to SEQ ID NO: 1065
  Probe

SEQ ID NO: 40331 - DNA, 38 bp, Artificial Sequence; identical to SEQ ID NO: 20832
  Probe

SEQ ID NO: 40332 - DNA, 37 bp, Artificial Sequence; identical to SEQ ID NO: 1074
  Probe

SEQ ID NO: 40333 - DNA, 38 bp, Artificial Sequence; identical to SEQ ID NO: 13544
  Probe

SEQ ID NO: 40334 - DNA, 41 bp, Artificial Sequence; identical to SEQ ID NO: 5997
  Probe

SEQ ID NO: 40335 - DNA, 43 bp, Artificial Sequence; identical to SEQ ID NO: 20834
  Probe

SEQ ID NO: 40336 - DNA, 45 bp, Artificial Sequence; identical to SEQ ID NO: 5998
  Probe

SEQ ID NO: 40337 - DNA, 46 bp, Artificial Sequence
  Probe
gcccggctagctcagtcggtagagcatgagactcttaatctcaggg

SEQ ID NO: 40338 - DNA, 37 bp, Artificial Sequence; identical to SEQ ID NO: 1087
  Probe

SEQ ID NO: 40339 - DNA, 38 bp, Artificial Sequence; identical to SEQ ID NO: 6000
  Probe

SEQ ID NO: 40340 - DNA, 42 bp, Artificial Sequence; identical to SEQ ID NO: 1089
  Probe

SEQ ID NO: 40341 - DNA, 45 bp, Artificial Sequence; identical to SEQ ID NO: 1090
  Probe

SEQ ID NO: 40342 - DNA, 46 bp, Artificial Sequence; identical to SEQ ID NO: 6004
  Probe

SEQ ID NO: 40343 - DNA, 50 bp, Artificial Sequence; identical to SEQ ID NO: 6012
  Probe

SEQ ID NO: 40344 - DNA, 23 bp, Artificial Sequence
  Probe
gccgaaatagctcagttgggaga

SEQ ID NO: 40345 - DNA, 24 bp, Artificial Sequence
  Probe
gccgaaatagctcagttgggagag

SEQ ID NO: 40346 - DNA, 25 bp, Artificial Sequence
  Probe
gccgaaatagctcagttgggagagc

SEQ ID NO: 40347 - DNA, 30 bp, Artificial Sequence; identical to SEQ ID NO: 10395
  Probe

SEQ ID NO: 40348 - DNA, 31 bp, Artificial Sequence; identical to SEQ ID NO: 13572
  Probe

SEQ ID NO: 40349 - DNA, 33 bp, Artificial Sequence; identical to SEQ ID NO: 6022
  Probe

SEQ ID NO: 40350 - DNA, 34 bp, Artificial Sequence; identical to SEQ ID NO: 6023
  Probe

SEQ ID NO: 40351 - DNA, 34 bp, Artificial Sequence; identical to SEQ ID NO: 6024
  Probe

SEQ ID NO: 40352 - DNA, 34 bp, Artificial Sequence; identical to SEQ ID NO: 6027
  Probe

SEQ ID NO: 40353 - DNA, 36 bp, Artificial Sequence; identical to SEQ ID NO: 6028
  Probe

SEQ ID NO: 40354 - DNA, 26 bp, Artificial Sequence
  Probe
gccgctggtgtagtggtatcatgcaa

SEQ ID NO: 40355 - DNA, 27 bp, Artificial Sequence
  Probe
gccgctggtgtagtggtatcatgcaag

SEQ ID NO: 40356 - DNA, 31 bp, Artificial Sequence; identical to SEQ ID NO: 1101
  Probe

SEQ ID NO: 40357 - DNA, 21 bp, Artificial Sequence
  Probe
gccgggtactttcgtattttt

SEQ ID NO: 40358 - DNA, 37 bp, Artificial Sequence
  Probe
gccgtcgtcctcgttagtatagtggtgagtatccccg

SEQ ID NO: 40359 - DNA, 23 bp, Artificial Sequence
  Probe
gccgtgatcgtatagtggttagt

SEQ ID NO: 40360 - DNA, 24 bp, Artificial Sequence
  Probe
gccgtgatcgtatagtggttagta

SEQ ID NO: 40361 - DNA, 26 bp, Artificial Sequence
  Probe
gccgtgatcgtatagtggttagtact

SEQ ID NO: 40362 - DNA, 27 bp, Artificial Sequence
  Probe
gccgtgatcgtatagtggttagtactc

SEQ ID NO: 40363 - DNA, 28 bp, Artificial Sequence
  Probe
gccgtgatcgtatagtggttagtactct

SEQ ID NO: 40364 - DNA, 29 bp, Artificial Sequence
  Probe
gccgtgatcgtatagtggttagtactctg

SEQ ID NO: 40365 - DNA, 35 bp, Artificial Sequence; identical to SEQ ID NO: 1110
  Probe

SEQ ID NO: 40366 - DNA, 37 bp, Artificial Sequence; identical to SEQ ID NO: 6039
  Probe

SEQ ID NO: 40367 - DNA, 50 bp, Artificial Sequence; identical to SEQ ID NO: 6040
  Probe

SEQ ID NO: 40368 - DNA, 23 bp, Artificial Sequence
  Probe
gcctaacacgcgaaaggtccccg

SEQ ID NO: 40369 - DNA, 24 bp, Artificial Sequence
  Probe
gcctaacacgcgaaaggtccccgg

SEQ ID NO: 40370 - DNA, 25 bp, Artificial Sequence
  Probe
gcctaacacgcgaaaggtccccggt

SEQ ID NO: 40371 - DNA, 41 bp, Artificial Sequence
  Probe
gcctaacacgcgaaaggtccccggttcgaaaccgggcggaa

SEQ ID NO: 40372 - DNA, 42 bp, Artificial Sequence
  Probe
gcctaacacgcgaaaggtccccggttcgaaaccgggcggaaa

SEQ ID NO: 40373 - DNA, 44 bp, Artificial Sequence
  Probe
gcctaacacgcgaaaggtccccggttcgaaaccgggcggaaaca

SEQ ID NO: 40374 - DNA, 20 bp, Artificial Sequence
  Probe
gcctcacacgcgaaaggtcc

SEQ ID NO: 40375 - DNA, 41 bp, Artificial Sequence
  Probe
gcctcacacgcgaaaggtccccggttcgaaaccgggcagaa

SEQ ID NO: 40376 - DNA, 44 bp, Artificial Sequence
  Probe
gcctcacacgcgaaaggtccccggttcgaaaccgggcagaagca

SEQ ID NO: 40377 - DNA, 50 bp, Artificial Sequence
  Probe
gcctcacacgcgaaaggtccccggttcgaaaccgggcagaagcaacctgt

SEQ ID NO: 40378 - DNA, 43 bp, Artificial Sequence
  Probe
gcctcacacgcgaaaggtccccggttcgaaaccgggcggaaac

SEQ ID NO: 40379 - DNA, 50 bp, Artificial Sequence
  Probe
gcctcacacgcgaaaggtccccggttcgaaaccgggcggaaacaaagtgg

SEQ ID NO: 40380 - DNA, 50 bp, Artificial Sequence
  Probe
gcctcacacgcgaaaggtccccggttcgaaaccgggcggaaacacctcct

SEQ ID NO: 40381 - DNA, 50 bp, Artificial Sequence
  Probe
gcctcacacgcgaaaggtccccggttcgaaaccgggcggaaacacgtttt

SEQ ID NO: 40382 - DNA, 50 bp, Artificial Sequence
  Probe
gcctcacacgcgaaaggtccccggttcgatcccgggcggaaacaggtcag

SEQ ID NO: 40383 - DNA, 41 bp, Artificial Sequence
  Probe
gcctcccacgcgggagacccgggttcaattcccggccaatg

SEQ ID NO: 40384 - DNA, 46 bp, Artificial Sequence
  Probe
gcctcccacgcgggagacccgggttcaattcccggccaatgcaaaa

SEQ ID NO: 40385 - DNA, 50 bp, Artificial Sequence
  Probe
gcctcctaagccagggattgtgggttcgagtcccacccggggtaaagaaa

SEQ ID NO: 40386 - DNA, 50 bp, Artificial Sequence
  Probe
gcctcctaagccagggattgtgggttcgagtcccacctggggtgtcgaga

SEQ ID NO: 40387 - DNA, 31 bp, Artificial Sequence
  Probe
gcctcgggttcgatccccgacacctccaagc

SEQ ID NO: 40388 - DNA, 19 bp, Artificial Sequence
  Probe
gcctcgttagcgcagtagg

SEQ ID NO: 40389 - DNA, 20 bp, Artificial Sequence
  Probe
gcctcgttagcgcagtaggt

SEQ ID NO: 40390 - DNA, 24 bp, Artificial Sequence
  Probe
gcctcgttagcgcagtaggtagcg

SEQ ID NO: 40391 - DNA, 34 bp, Artificial Sequence
  Probe
gcctctccctggtggtctagtggttaggattcgg

SEQ ID NO: 40392 - DNA, 36 bp, Artificial Sequence; identical to SEQ ID NO: 31916
  Probe

SEQ ID NO: 40393 - DNA, 31 bp, Artificial Sequence
  Probe
gcctgccacgcgggaggcccgggttcgattc

SEQ ID NO: 40394 - DNA, 32 bp, Artificial Sequence
  Probe
gcctgccacgcgggaggcccgggttcgattcc

SEQ ID NO: 40395 - DNA, 33 bp, Artificial Sequence
  Probe
gcctgccacgcgggaggcccgggttcgattccc

SEQ ID NO: 40396 - DNA, 34 bp, Artificial Sequence
  Probe
gcctgccacgcgggaggcccgggttcgattcccg

SEQ ID NO: 40397 - DNA, 41 bp, Artificial Sequence
  Probe
gcctgccacgcgggaggcccgggttcgattcccggccaatg

SEQ ID NO: 40398 - DNA, 43 bp, Artificial Sequence
  Probe
gcctgccacgcgggaggcccgggttcgattcccggccaatgca

SEQ ID NO: 40399 - DNA, 50 bp, Artificial Sequence
  Probe
gcctgccacgcgggaggcccgggttcgattcccggccaatgcaacgatga

SEQ ID NO: 40400 - DNA, 46 bp, Artificial Sequence; identical to SEQ ID NO: 20930
  Probe

SEQ ID NO: 40401 - DNA, 49 bp, Artificial Sequence
  Probe
gcctgccacgcgggaggcccgggttcgattcccggccaatgcaagtttt

SEQ ID NO: 40402 - DNA, 50 bp, Artificial Sequence
  Probe
gcctgccacgcgggaggcccgggttcgattcccggccaatgcaagttttg

SEQ ID NO: 40403 - DNA, 46 bp, Artificial Sequence; identical to SEQ ID NO: 20931
  Probe

SEQ ID NO: 40404 - DNA, 49 bp, Artificial Sequence
  Probe
gcctgccacgcgggaggcccgggttcgattcccggccaatgcacgagta

SEQ ID NO: 40405 - DNA, 50 bp, Artificial Sequence
  Probe
gcctgccacgcgggaggcccgggttcgattcccggccaatgcacgagtac

SEQ ID NO: 40406 - DNA, 46 bp, Artificial Sequence; identical to SEQ ID NO: 20932
  Probe

SEQ ID NO: 40407 - DNA, 49 bp, Artificial Sequence
  Probe
gcctgccacgcgggaggcccgggttcgattcccggccaatgcactttca

SEQ ID NO: 40408 - DNA, 50 bp, Artificial Sequence
  Probe
gcctgccacgcgggaggcccgggttcgattcccggccaatgcactttcat

SEQ ID NO: 40409 - DNA, 46 bp, Artificial Sequence; identical to SEQ ID NO: 20933
  Probe

SEQ ID NO: 40410 - DNA, 49 bp, Artificial Sequence
  Probe
gcctgccacgcgggaggcccgggttcgattcccggccaatgcagcagca

SEQ ID NO: 40411 - DNA, 50 bp, Artificial Sequence
  Probe
gcctgccacgcgggaggcccgggttcgattcccggccaatgcagcagcag

SEQ ID NO: 40412 - DNA, 50 bp, Artificial Sequence
  Probe
gcctgccacgcgggaggcccgggttcgattcccggccaatgcagcagctg

SEQ ID NO: 40413 - DNA, 43 bp, Artificial Sequence
  Probe
gcctgccacgcgggaggcccgggttcgattcccggcccatgca

SEQ ID NO: 40414 - DNA, 46 bp, Artificial Sequence; identical to SEQ ID NO: 20935
  Probe

SEQ ID NO: 40415 - DNA, 49 bp, Artificial Sequence
  Probe
gcctgccacgcgggaggcccgggttcgattcccggcccatgcagcacga

SEQ ID NO: 40416 - DNA, 50 bp, Artificial Sequence; identical to SEQ ID NO: 20936
  Probe

SEQ ID NO: 40417 - DNA, 50 bp, Artificial Sequence; identical to SEQ ID NO: 20938
  Probe

SEQ ID NO: 40418 - DNA, 25 bp, Artificial Sequence
  Probe
gcctggatagctcagtcggtagagc

SEQ ID NO: 40419 - DNA, 26 bp, Artificial Sequence
  Probe
gcctggatagctcagtcggtagagca

SEQ ID NO: 40420 - DNA, 35 bp, Artificial Sequence; identical to SEQ ID NO: 1118
  Probe

SEQ ID NO: 40421 - DNA, 36 bp, Artificial Sequence; identical to SEQ ID NO: 1119
  Probe

SEQ ID NO: 40422 - DNA, 31 bp, Artificial Sequence
  Probe
gcctggatagctcagttggtagaacatcaga

SEQ ID NO: 40423 - DNA, 26 bp, Artificial Sequence
  Probe
gcctggatagctcagttggtagagca

SEQ ID NO: 40424 - DNA, 29 bp, Artificial Sequence
  Probe
gcctggatagctcagttggtagagcatca

SEQ ID NO: 40425 - DNA, 34 bp, Artificial Sequence; identical to SEQ ID NO: 1123
  Probe

SEQ ID NO: 40426 - DNA, 28 bp, Artificial Sequence
  Probe
gcctgggtagctcagtcggtagagcatc

SEQ ID NO: 40427 - DNA, 22 bp, Artificial Sequence
  Probe
gcctgtcacgcgggagaccggg

SEQ ID NO: 40428 - DNA, 23 bp, Artificial Sequence
  Probe
gcctgtcacgcgggagaccgggg

SEQ ID NO: 40429 - DNA, 25 bp, Artificial Sequence
  Probe
gcctgtcacgcgggagaccggggtt

SEQ ID NO: 40430 - DNA, 26 bp, Artificial Sequence
  Probe
gcctgtcacgcgggagaccggggttc

SEQ ID NO: 40431 - DNA, 36 bp, Artificial Sequence; identical to SEQ ID NO: 20954
  Probe

SEQ ID NO: 40432 - DNA, 44 bp, Artificial Sequence; identical to SEQ ID NO: 6059
  Probe

SEQ ID NO: 40433 - DNA, 45 bp, Artificial Sequence
  Probe
gcctgtcacgcgggagaccggggttcaattccccgacggggaggt

SEQ ID NO: 40434 - DNA, 46 bp, Artificial Sequence; identical to SEQ ID NO: 6060
  Probe

SEQ ID NO: 40435 - DNA, 50 bp, Artificial Sequence; identical to SEQ ID NO: 20959
  Probe

SEQ ID NO: 40436 - DNA, 30 bp, Artificial Sequence; identical to SEQ ID NO: 20962
  Probe

SEQ ID NO: 40437 - DNA, 31 bp, Artificial Sequence; identical to SEQ ID NO: 20963
  Probe

SEQ ID NO: 40438 - DNA, 34 bp, Artificial Sequence
  Probe
gcctgtcacgcgggagaccggggttcgattcccc

SEQ ID NO: 40439 - DNA, 35 bp, Artificial Sequence
  Probe
gcctgtcacgcgggagaccggggttcgattcccca

SEQ ID NO: 40440 - DNA, 36 bp, Artificial Sequence
  Probe
gcctgtcacgcgggagaccggggttcgattccccaa

SEQ ID NO: 40441 - DNA, 41 bp, Artificial Sequence
  Probe
gcctgtcacgcgggagaccggggttcgattccccaacgggg

SEQ ID NO: 40442 - DNA, 43 bp, Artificial Sequence
  Probe
gcctgtcacgcgggagaccggggttcgattccccaacggggag

SEQ ID NO: 40443 - DNA, 46 bp, Artificial Sequence; identical to SEQ ID NO: 20964
  Probe

SEQ ID NO: 40444 - DNA, 50 bp, Artificial Sequence
  Probe
gcctgtcacgcgggagaccggggttcgattccccaacggggaggctaata

SEQ ID NO: 40445 - DNA, 36 bp, Artificial Sequence; identical to SEQ ID NO: 13618
  Probe

SEQ ID NO: 40446 - DNA, 38 bp, Artificial Sequence; identical to SEQ ID NO: 13619
  Probe

SEQ ID NO: 40447 - DNA, 44 bp, Artificial Sequence; identical to SEQ ID NO: 6062
  Probe

SEQ ID NO: 40448 - DNA, 45 bp, Artificial Sequence
  Probe
gcctgtcacgcgggagaccggggttcgattccccgacggggagaa

SEQ ID NO: 40449 - DNA, 46 bp, Artificial Sequence; identical to SEQ ID NO: 20968
  Probe

SEQ ID NO: 40450 - DNA, 50 bp, Artificial Sequence; identical to SEQ ID NO: 6063
  Probe

SEQ ID NO: 40451 - DNA, 45 bp, Artificial Sequence
  Probe
gcctgtcacgcgggagaccggggttcgattccccgacggggagag

SEQ ID NO: 40452 - DNA, 46 bp, Artificial Sequence; identical to SEQ ID NO: 6064
  Probe

SEQ ID NO: 40453 - DNA, 50 bp, Artificial Sequence
  Probe
gcctgtcacgcgggagaccggggttcgattccccgacggggagagtacta

SEQ ID NO: 40454 - DNA, 44 bp, Artificial Sequence; identical to SEQ ID NO: 6065
  Probe

SEQ ID NO: 40455 - DNA, 45 bp, Artificial Sequence
  Probe
gcctgtcacgcgggagaccggggttcgattccccgacggggagga

SEQ ID NO: 40456 - DNA, 46 bp, Artificial Sequence; identical to SEQ ID NO: 20972
  Probe

SEQ ID NO: 40457 - DNA, 50 bp, Artificial Sequence; identical to SEQ ID NO: 20973
  Probe

SEQ ID NO: 40458 - DNA, 45 bp, Artificial Sequence
  Probe
gcctgtcacgcgggagaccggggttcgattccccgacggggaggc

SEQ ID NO: 40459 - DNA, 46 bp, Artificial Sequence; identical to SEQ ID NO: 6066
  Probe

SEQ ID NO: 40460 - DNA, 50 bp, Artificial Sequence; identical to SEQ ID NO: 6068
  Probe

SEQ ID NO: 40461 - DNA, 50 bp, Artificial Sequence; identical to SEQ ID NO: 20978
  Probe

SEQ ID NO: 40462 - DNA, 46 bp, Artificial Sequence; identical to SEQ ID NO: 6070
  Probe

SEQ ID NO: 40463 - DNA, 50 bp, Artificial Sequence; identical to SEQ ID NO: 20980
  Probe

SEQ ID NO: 40464 - DNA, 50 bp, Artificial Sequence; identical to SEQ ID NO: 20981
  Probe

SEQ ID NO: 40465 - DNA, 17 bp, Artificial Sequence
  Probe
gccttccaagcagttga

SEQ ID NO: 40466 - DNA, 20 bp, Artificial Sequence
  Probe
gccttccaagcagttgaccc

SEQ ID NO: 40467 - DNA, 24 bp, Artificial Sequence
  Probe
gccttccaagcagttgacccgggt

SEQ ID NO: 40468 - DNA, 50 bp, Artificial Sequence
  Probe
gccttccaagcagttgacccgggttcgattcccggccaacgcaagggttt

SEQ ID NO: 40469 - DNA, 46 bp, Artificial Sequence; identical to SEQ ID NO: 20985
  Probe

SEQ ID NO: 40470 - DNA, 50 bp, Artificial Sequence
  Probe
gccttccaagcagttgacccgggttcgattcccggccaacgcaagtcgtt

SEQ ID NO: 40471 - DNA, 46 bp, Artificial Sequence
  Probe
gccttccaagcagttgacccgggttcgattcccggccaacgcagcg

SEQ ID NO: 40472 - DNA, 50 bp, Artificial Sequence
  Probe
gccttccaagcagttgacccgggttcgattcccggccaacgcagcgggcg

SEQ ID NO: 40473 - DNA, 46 bp, Artificial Sequence; identical to SEQ ID NO: 20986
  Probe

SEQ ID NO: 40474 - DNA, 49 bp, Artificial Sequence
  Probe
gccttccaagcagttgacccgggttcgattcccggccaacgcagtgtca

SEQ ID NO: 40475 - DNA, 50 bp, Artificial Sequence
  Probe
gccttccaagcagttgacccgggttcgattcccggccaacgcagtgtcag

SEQ ID NO: 40476 - DNA, 30 bp, Artificial Sequence; identical to SEQ ID NO: 20987
  Probe

SEQ ID NO: 40477 - DNA, 29 bp, Artificial Sequence
  Probe
gccttggtggtgcagtggtagaattctcg

SEQ ID NO: 40478 - DNA, 32 bp, Artificial Sequence; identical to SEQ ID NO: 6077
  Probe

SEQ ID NO: 40479 - DNA, 38 bp, Artificial Sequence; identical to SEQ ID NO: 6078
  Probe

SEQ ID NO: 40480 - DNA, 28 bp, Artificial Sequence
  Probe
gcgacccgggttcgattcccgggcggcg

SEQ ID NO: 40481 - DNA, 30 bp, Artificial Sequence
  Probe
gcgacccgggttcgattcccgggcggcgca

SEQ ID NO: 40482 - DNA, 32 bp, Artificial Sequence; identical to SEQ ID NO: 21003
  Probe

SEQ ID NO: 40483 - DNA, 33 bp, Artificial Sequence; identical to SEQ ID NO: 21004
  Probe

SEQ ID NO: 40484 - DNA, 34 bp, Artificial Sequence; identical to SEQ ID NO: 21005
  Probe

SEQ ID NO: 40485 - DNA, 38 bp, Artificial Sequence; identical to SEQ ID NO: 21007
  Probe

SEQ ID NO: 40486 - DNA, 34 bp, Artificial Sequence; identical to SEQ ID NO: 21014
  Probe

SEQ ID NO: 40487 - DNA, 28 bp, Artificial Sequence
  Probe
gcgatccgagttcaaatctcggtggaac

SEQ ID NO: 40488 - DNA, 28 bp, Artificial Sequence
  Probe
gcgatccgagttcaaatctcggtgggac

SEQ ID NO: 40489 - DNA, 28 bp, Artificial Sequence
  Probe
gcgatccgagttcaagtctcggtggaac

SEQ ID NO: 40490 - DNA, 31 bp, Artificial Sequence
  Probe
gcgcattggtggttcagtggtagaattctcg

SEQ ID NO: 40491 - DNA, 34 bp, Artificial Sequence; identical to SEQ ID NO: 31946
  Probe

SEQ ID NO: 40492 - DNA, 37 bp, Artificial Sequence; identical to SEQ ID NO: 1156
  Probe

SEQ ID NO: 40493 - DNA, 38 bp, Artificial Sequence; identical to SEQ ID NO: 6089
  Probe

SEQ ID NO: 40494 - DNA, 41 bp, Artificial Sequence; identical to SEQ ID NO: 1159
  Probe

SEQ ID NO: 40495 - DNA, 42 bp, Artificial Sequence; identical to SEQ ID NO: 6090
  Probe

SEQ ID NO: 40496 - DNA, 44 bp, Artificial Sequence; identical to SEQ ID NO: 6092
  Probe

SEQ ID NO: 40497 - DNA, 45 bp, Artificial Sequence; identical to SEQ ID NO: 6093
  Probe

SEQ ID NO: 40498 - DNA, 46 bp, Artificial Sequence; identical to SEQ ID NO: 1160
  Probe

SEQ ID NO: 40499 - DNA, 50 bp, Artificial Sequence
  Probe
gcgcgttcggctgttaaccgaaaggttggtggttcgagcccacccaggga

SEQ ID NO: 40500 - DNA, 43 bp, Artificial Sequence
  Probe
gcgctctcaccgccgcggcccgggttcgattcccggtcaggga

SEQ ID NO: 40501 - DNA, 50 bp, Artificial Sequence; identical to SEQ ID NO: 6097
  Probe

SEQ ID NO: 40502 - DNA, 22 bp, Artificial Sequence
  Probe
gcggaagcgggtgctcttattt

SEQ ID NO: 40503 - DNA, 34 bp, Artificial Sequence
  Probe
gcggaagcgtgctgggcccataacccagaggtcg

SEQ ID NO: 40504 - DNA, 26 bp, Artificial Sequence
  Probe
gcggcccgggttcgactcccggtgtg

SEQ ID NO: 40505 - DNA, 27 bp, Artificial Sequence
  Probe
gcggcccgggttcgactcccggtgtgg

SEQ ID NO: 40506 - DNA, 28 bp, Artificial Sequence
  Probe
gcggcccgggttcgactcccggtgtggg

SEQ ID NO: 40507 - DNA, 29 bp, Artificial Sequence
  Probe
gcggcccgggttcgactcccggtgtggga

SEQ ID NO: 40508 - DNA, 30 bp, Artificial Sequence; identical to SEQ ID NO: 13658
  Probe

SEQ ID NO: 40509 - DNA, 27 bp, Artificial Sequence
  Probe
gcggcccgggttcgattcccggtcagg

SEQ ID NO: 40510 - DNA, 28 bp, Artificial Sequence
  Probe
gcggcccgggttcgattcccggtcaggg

SEQ ID NO: 40511 - DNA, 30 bp, Artificial Sequence; identical to SEQ ID NO: 13662
  Probe

SEQ ID NO: 40512 - DNA, 33 bp, Artificial Sequence; identical to SEQ ID NO: 6104
  Probe

SEQ ID NO: 40513 - DNA, 50 bp, Artificial Sequence
  Probe
gcggctgtgatggccgagtggttaaggcgttggactcgaaatccaatggg

SEQ ID NO: 40514 - DNA, 32 bp, Artificial Sequence
  Probe
gcgggagacccgggttcaattcccggccaatg

SEQ ID NO: 40515 - DNA, 33 bp, Artificial Sequence; identical to SEQ ID NO: 6107
  Probe

SEQ ID NO: 40516 - DNA, 37 bp, Artificial Sequence; identical to SEQ ID NO: 6109
  Probe

SEQ ID NO: 40517 - DNA, 32 bp, Artificial Sequence; identical to SEQ ID NO: 31972
  Probe

SEQ ID NO: 40518 - DNA, 34 bp, Artificial Sequence
  Probe
gcgggagaccggggttcgattccccaacggggag

SEQ ID NO: 40519 - DNA, 27 bp, Artificial Sequence
  Probe
gcgggagaccggggttcgattccccga

SEQ ID NO: 40520 - DNA, 28 bp, Artificial Sequence
  Probe
gcgggagaccggggttcgattccccgac

SEQ ID NO: 40521 - DNA, 29 bp, Artificial Sequence
  Probe
gcgggagaccggggttcgattccccgacg

SEQ ID NO: 40522 - DNA, 35 bp, Artificial Sequence; identical to SEQ ID NO: 6112
  Probe

SEQ ID NO: 40523 - DNA, 37 bp, Artificial Sequence; identical to SEQ ID NO: 6117
  Probe

SEQ ID NO: 40524 - DNA, 35 bp, Artificial Sequence; identical to SEQ ID NO: 6118
  Probe

SEQ ID NO: 40525 - DNA, 37 bp, Artificial Sequence; identical to SEQ ID NO: 6121
  Probe

SEQ ID NO: 40526 - DNA, 32 bp, Artificial Sequence; identical to SEQ ID NO: 21098
  Probe

SEQ ID NO: 40527 - DNA, 33 bp, Artificial Sequence; identical to SEQ ID NO: 6124
  Probe

SEQ ID NO: 40528 - DNA, 33 bp, Artificial Sequence; identical to SEQ ID NO: 21108
  Probe

SEQ ID NO: 40529 - DNA, 23 bp, Artificial Sequence
  Probe
gcggtctagtggttaggattcgg

SEQ ID NO: 40530 - DNA, 50 bp, Artificial Sequence
  Probe
gcgtctacccagggcctggatagctcagttggtagaacatcagactttta

SEQ ID NO: 40531 - DNA, 35 bp, Artificial Sequence
  Probe
gcgtgaggccctatagctcaggggttagagcactg

SEQ ID NO: 40532 - DNA, 24 bp, Artificial Sequence
  Probe
gcgtgggttcgaatcccatcctcg

SEQ ID NO: 40533 - DNA, 25 bp, Artificial Sequence
  Probe
gcgtgggttcgaatcccatcctcgt

SEQ ID NO: 40534 - DNA, 17 bp, Artificial Sequence
  Probe
gcgttggtggtatagtg

SEQ ID NO: 40535 - DNA, 18 bp, Artificial Sequence
  Probe
gcgttggtggtatagtgg

SEQ ID NO: 40536 - DNA, 33 bp, Artificial Sequence; identical to SEQ ID NO: 1186
  Probe

SEQ ID NO: 40537 - DNA, 34 bp, Artificial Sequence; identical to SEQ ID NO: 1187
  Probe

SEQ ID NO: 40538 - DNA, 35 bp, Artificial Sequence; identical to SEQ ID NO: 1188
  Probe

SEQ ID NO: 40539 - DNA, 39 bp, Artificial Sequence; identical to SEQ ID NO: 21123
  Probe

SEQ ID NO: 40540 - DNA, 44 bp, Artificial Sequence; identical to SEQ ID NO: 1191
  Probe

SEQ ID NO: 40541 - DNA, 20 bp, Artificial Sequence
  Probe
gcgttggtggtatagtggtg

SEQ ID NO: 40542 - DNA, 21 bp, Artificial Sequence
  Probe
gcgttggtggtatagtggtga

SEQ ID NO: 40543 - DNA, 22 bp, Artificial Sequence
  Probe
gcgttggtggtatagtggtgag

SEQ ID NO: 40544 - DNA, 23 bp, Artificial Sequence
  Probe
gcgttggtggtatagtggtgagc

SEQ ID NO: 40545 - DNA, 24 bp, Artificial Sequence
  Probe
gcgttggtggtatagtggtgagca

SEQ ID NO: 40546 - DNA, 25 bp, Artificial Sequence
  Probe
gcgttggtggtatagtggtgagcat

SEQ ID NO: 40547 - DNA, 26 bp, Artificial Sequence
  Probe
gcgttggtggtatagtggtgagcata

SEQ ID NO: 40548 - DNA, 27 bp, Artificial Sequence
  Probe
gcgttggtggtatagtggtgagcatag

SEQ ID NO: 40549 - DNA, 28 bp, Artificial Sequence
  Probe
gcgttggtggtatagtggtgagcatagc

SEQ ID NO: 40550 - DNA, 29 bp, Artificial Sequence
  Probe
gcgttggtggtatagtggtgagcatagct

SEQ ID NO: 40551 - DNA, 30 bp, Artificial Sequence; identical to SEQ ID NO: 6150
  Probe

SEQ ID NO: 40552 - DNA, 31 bp, Artificial Sequence; identical to SEQ ID NO: 6151
  Probe

SEQ ID NO: 40553 - DNA, 32 bp, Artificial Sequence; identical to SEQ ID NO: 6152
  Probe

SEQ ID NO: 40554 - DNA, 33 bp, Artificial Sequence; identical to SEQ ID NO: 6153
  Probe

SEQ ID NO: 40555 - DNA, 34 bp, Artificial Sequence; identical to SEQ ID NO: 6154
  Probe

SEQ ID NO: 40556 - DNA, 35 bp, Artificial Sequence; identical to SEQ ID NO: 6155
  Probe

SEQ ID NO: 40557 - DNA, 36 bp, Artificial Sequence; identical to SEQ ID NO: 6156
  Probe

SEQ ID NO: 40558 - DNA, 37 bp, Artificial Sequence; identical to SEQ ID NO: 6157
  Probe

SEQ ID NO: 40559 - DNA, 38 bp, Artificial Sequence; identical to SEQ ID NO: 21144
  Probe

SEQ ID NO: 40560 - DNA, 41 bp, Artificial Sequence; identical to SEQ ID NO: 13692
  Probe

SEQ ID NO: 40561 - DNA, 45 bp, Artificial Sequence; identical to SEQ ID NO: 6160
  Probe

SEQ ID NO: 40562 - DNA, 46 bp, Artificial Sequence; identical to SEQ ID NO: 6161
  Probe

SEQ ID NO: 40563 - DNA, 29 bp, Artificial Sequence
  Probe
gcgttggtggtatagtggtgagcatagtt

SEQ ID NO: 40564 - DNA, 30 bp, Artificial Sequence
  Probe
gcgttggtggtatagtggtgagcatagttg

SEQ ID NO: 40565 - DNA, 23 bp, Artificial Sequence
  Probe
gcgttggtggtatagtggttagc

SEQ ID NO: 40566 - DNA, 24 bp, Artificial Sequence
  Probe
gcgttggtggtatagtggttagca

SEQ ID NO: 40567 - DNA, 25 bp, Artificial Sequence
  Probe
gcgttggtggtatagtggttagcat

SEQ ID NO: 40568 - DNA, 26 bp, Artificial Sequence
  Probe
gcgttggtggtatagtggttagcata

SEQ ID NO: 40569 - DNA, 27 bp, Artificial Sequence
  Probe
gcgttggtggtatagtggttagcatag

SEQ ID NO: 40570 - DNA, 28 bp, Artificial Sequence
  Probe
gcgttggtggtatagtggttagcatagc

SEQ ID NO: 40571 - DNA, 29 bp, Artificial Sequence
  Probe
gcgttggtggtatagtggttagcatagct

SEQ ID NO: 40572 - DNA, 30 bp, Artificial Sequence; identical to SEQ ID NO: 6172
  Probe

SEQ ID NO: 40573 - DNA, 31 bp, Artificial Sequence; identical to SEQ ID NO: 6173
  Probe

SEQ ID NO: 40574 - DNA, 32 bp, Artificial Sequence; identical to SEQ ID NO: 6174
  Probe

SEQ ID NO: 40575 - DNA, 33 bp, Artificial Sequence; identical to SEQ ID NO: 6175
  Probe

SEQ ID NO: 40576 - DNA, 34 bp, Artificial Sequence; identical to SEQ ID NO: 6176
  Probe

SEQ ID NO: 40577 - DNA, 35 bp, Artificial Sequence; identical to SEQ ID NO: 6177
  Probe

SEQ ID NO: 40578 - DNA, 36 bp, Artificial Sequence; identical to SEQ ID NO: 6178
  Probe

SEQ ID NO: 40579 - DNA, 44 bp, Artificial Sequence; identical to SEQ ID NO: 1196
  Probe

SEQ ID NO: 40580 - DNA, 30 bp, Artificial Sequence
  Probe
gcgttggtggtgtagtggtgagcacagctg

SEQ ID NO: 40581 - DNA, 28 bp, Artificial Sequence
  Probe
gcgttggtggtttagtggtagaattctc

SEQ ID NO: 40582 - DNA, 30 bp, Artificial Sequence; identical to SEQ ID NO: 10512
  Probe

SEQ ID NO: 40583 - DNA, 32 bp, Artificial Sequence; identical to SEQ ID NO: 6188
  Probe

SEQ ID NO: 40584 - DNA, 33 bp, Artificial Sequence; identical to SEQ ID NO: 21178
  Probe

SEQ ID NO: 40585 - DNA, 34 bp, Artificial Sequence
  Probe
gcgttggtggtttagtggtagaattctcgcctcc

SEQ ID NO: 40586 - DNA, 19 bp, Artificial Sequence
  Probe
gctaaacctagccccaaac

SEQ ID NO: 40587 - DNA, 20 bp, Artificial Sequence
  Probe
gctaaacctagccccaaacc

SEQ ID NO: 40588 - DNA, 21 bp, Artificial Sequence
  Probe
gctaaacctagccccaaaccc

SEQ ID NO: 40589 - DNA, 22 bp, Artificial Sequence
  Probe
gctaaacctagccccaaaccca

SEQ ID NO: 40590 - DNA, 23 bp, Artificial Sequence
  Probe
gctaaacctagccccaaacccac

SEQ ID NO: 40591 - DNA, 24 bp, Artificial Sequence
  Probe
gctaaacctagccccaaacccact

SEQ ID NO: 40592 - DNA, 25 bp, Artificial Sequence
  Probe
gctaaacctagccccaaacccactc

SEQ ID NO: 40593 - DNA, 26 bp, Artificial Sequence
  Probe
gctaaacctagccccaaacccactcc

SEQ ID NO: 40594 - DNA, 27 bp, Artificial Sequence
  Probe
gctaaacctagccccaaacccactcca

SEQ ID NO: 40595 - DNA, 28 bp, Artificial Sequence
  Probe
gctaaacctagccccaaacccactccac

SEQ ID NO: 40596 - DNA, 29 bp, Artificial Sequence
  Probe
gctaaacctagccccaaacccactccacc

SEQ ID NO: 40597 - DNA, 30 bp, Artificial Sequence; identical to SEQ ID NO: 6203
  Probe

SEQ ID NO: 40598 - DNA, 23 bp, Artificial Sequence
  Probe
gctaaatcctatatatcttaatg

SEQ ID NO: 40599 - DNA, 38 bp, Artificial Sequence; identical to SEQ ID NO: 6221
  Probe

SEQ ID NO: 40600 - DNA, 43 bp, Artificial Sequence; identical to SEQ ID NO: 6226
  Probe

SEQ ID NO: 40601 - DNA, 25 bp, Artificial Sequence
  Probe
gctaaggaagtcctgtgctcagttt

SEQ ID NO: 40602 - DNA, 26 bp, Artificial Sequence
  Probe
gctaaggaagtcctgtgctcagtttt

SEQ ID NO: 40603 - DNA, 27 bp, Artificial Sequence
  Probe
gctaaggaagtcctgtgctcagttttg

SEQ ID NO: 40604 - DNA, 30 bp, Artificial Sequence
  Probe
gctaaggaagtcctgtgctcagttttgtag

SEQ ID NO: 40605 - DNA, 35 bp, Artificial Sequence; identical to SEQ ID NO: 6234
  Probe

SEQ ID NO: 40606 - DNA, 37 bp, Artificial Sequence; identical to SEQ ID NO: 6235
  Probe

SEQ ID NO: 40607 - DNA, 42 bp, Artificial Sequence; identical to SEQ ID NO: 6240
  Probe

SEQ ID NO: 40608 - DNA, 17 bp, Artificial Sequence
  Probe
gctagctcagtcggtag

SEQ ID NO: 40609 - DNA, 19 bp, Artificial Sequence
  Probe
gctagctcagtcggtagag

SEQ ID NO: 40610 - DNA, 21 bp, Artificial Sequence
  Probe
gctagctcagtcggtagagca

SEQ ID NO: 40611 - DNA, 23 bp, Artificial Sequence
  Probe
gctagctcagtcggtagagcatg

SEQ ID NO: 40612 - DNA, 24 bp, Artificial Sequence
  Probe
gctagctcagtcggtagagcatga

SEQ ID NO: 40613 - DNA, 25 bp, Artificial Sequence
  Probe
gctagctcagtcggtagagcatgag

SEQ ID NO: 40614 - DNA, 26 bp, Artificial Sequence
  Probe
gctagctcagtcggtagagcatgaga

SEQ ID NO: 40615 - DNA, 27 bp, Artificial Sequence
  Probe
gctagctcagtcggtagagcatgagac

SEQ ID NO: 40616 - DNA, 23 bp, Artificial Sequence
  Probe
gctatcgggcccataccccgaaa

SEQ ID NO: 40617 - DNA, 24 bp, Artificial Sequence
  Probe
gctatcgggcccataccccgaaaa

SEQ ID NO: 40618 - DNA, 25 bp, Artificial Sequence
  Probe
gctatcgggcccataccccgaaaat

SEQ ID NO: 40619 - DNA, 28 bp, Artificial Sequence
  Probe
gctatcgggcccataccccgaaaatgtt

SEQ ID NO: 40620 - DNA, 29 bp, Artificial Sequence
  Probe
gctatcgggcccataccccgaaaatgttg

SEQ ID NO: 40621 - DNA, 30 bp, Artificial Sequence; identical to SEQ ID NO: 6264
  Probe

SEQ ID NO: 40622 - DNA, 31 bp, Artificial Sequence; identical to SEQ ID NO: 6265
  Probe

SEQ ID NO: 40623 - DNA, 50 bp, Artificial Sequence; identical to SEQ ID NO: 6269
  Probe

SEQ ID NO: 40624 - DNA, 24 bp, Artificial Sequence
  Probe
gctcacatcaccccataaacaaat

SEQ ID NO: 40625 - DNA, 33 bp, Artificial Sequence; identical to SEQ ID NO: 6280
  Probe

SEQ ID NO: 40626 - DNA, 34 bp, Artificial Sequence
  Probe
gctccagtggcgcaatcggttagcgcgcggtact

SEQ ID NO: 40627 - DNA, 30 bp, Artificial Sequence; identical to SEQ ID NO: 1206
  Probe

SEQ ID NO: 40628 - DNA, 50 bp, Artificial Sequence; identical to SEQ ID NO: 6286
  Probe

SEQ ID NO: 40629 - DNA, 30 bp, Artificial Sequence; identical to SEQ ID NO: 32108
  Probe

SEQ ID NO: 40630 - DNA, 33 bp, Artificial Sequence
  Probe
gctcgccgtgatcgtatagtggttagtactctg

SEQ ID NO: 40631 - DNA, 49 bp, Artificial Sequence
  Probe
gctctcaccgccgcggcccgggttcgattcccggtcaggaaagtaagcc

SEQ ID NO: 40632 - DNA, 50 bp, Artificial Sequence
  Probe
gctctcaccgccgcggcccgggttcgattcccggtcaggaaagtaagccg

SEQ ID NO: 40633 - DNA, 42 bp, Artificial Sequence
  Probe
gctctcaccgccgcggcccgggttcgattcccggtcagggaa

SEQ ID NO: 40634 - DNA, 45 bp, Artificial Sequence
  Probe
gctctcaccgccgcggcccgggttcgattcccggtcagggaaaga

SEQ ID NO: 40635 - DNA, 50 bp, Artificial Sequence
  Probe
gctctcaccgccgcggcccgggttcgattcccggtcagggaaagagtaac

SEQ ID NO: 40636 - DNA, 45 bp, Artificial Sequence
  Probe
gctctcaccgccgcggcccgggttcgattcccggtcagggaagcc

SEQ ID NO: 40637 - DNA, 50 bp, Artificial Sequence
  Probe
gctctcaccgccgcggcccgggttcgattcccggtcagggaagccttcct

SEQ ID NO: 40638 - DNA, 45 bp, Artificial Sequence; identical to SEQ ID NO: 6287
  Probe

SEQ ID NO: 40639 - DNA, 50 bp, Artificial Sequence
  Probe
gctctcaccgccgcggcccgggttcgattcccggtcagggaagtcttgtt

SEQ ID NO: 40640 - DNA, 45 bp, Artificial Sequence
  Probe
gctctcaccgccgcggcccgggttcgattcccggtcagggaatga

SEQ ID NO: 40641 - DNA, 50 bp, Artificial Sequence
  Probe
gctctcaccgccgcggcccgggttcgattcccggtcagggaatgaggttt

SEQ ID NO: 40642 - DNA, 17 bp, Artificial Sequence
  Probe
gctctgcctgccaactg

SEQ ID NO: 40643 - DNA, 18 bp, Artificial Sequence
  Probe
gctgcatagcaagccttt

SEQ ID NO: 40644 - DNA, 19 bp, Artificial Sequence
  Probe
gctgcatagcaagcctttt

SEQ ID NO: 40645 - DNA, 26 bp, Artificial Sequence
  Probe
gctggggcctcctgttggcttacttt

SEQ ID NO: 40646 - DNA, 22 bp, Artificial Sequence
  Probe
gctggggcctgcttccgtcttt

SEQ ID NO: 40647 - DNA, 23 bp, Artificial Sequence
  Probe
gctggggcctgcttccgtctttt

SEQ ID NO: 40648 - DNA, 23 bp, Artificial Sequence
  Probe
gctggtgtagtggtatcatgcaa

SEQ ID NO: 40649 - DNA, 34 bp, Artificial Sequence
  Probe
gctgtggctcgttggtctaggggtatgattctcg

SEQ ID NO: 40650 - DNA, 22 bp, Artificial Sequence
  Probe
gctgttaaccgaaagattggtg

SEQ ID NO: 40651 - DNA, 22 bp, Artificial Sequence
  Probe
gctgttaaccgaaagcttggtg

SEQ ID NO: 40652 - DNA, 20 bp, Artificial Sequence
  Probe
gctgttaaccgaaaggttgg

SEQ ID NO: 40653 - DNA, 23 bp, Artificial Sequence
  Probe
gctgttaaccgaaaggttggtgg

SEQ ID NO: 40654 - DNA, 27 bp, Artificial Sequence
  Probe
gctgttaaccgaaaggttggtggttcg

SEQ ID NO: 40655 - DNA, 42 bp, Artificial Sequence
  Probe
gctgttaaccgaaaggttggtggttcgagcccacccagggac

SEQ ID NO: 40656 - DNA, 43 bp, Artificial Sequence
  Probe
gctgttaaccgaaaggttggtggttcgagcccacccagggacg

SEQ ID NO: 40657 - DNA, 46 bp, Artificial Sequence
  Probe
gctgttaaccgaaaggttggtggttcgagcccacccagggacgcct

SEQ ID NO: 40658 - DNA, 45 bp, Artificial Sequence; identical to SEQ ID NO: 6301
  Probe

SEQ ID NO: 40659 - DNA, 46 bp, Artificial Sequence; identical to SEQ ID NO: 6302
  Probe

SEQ ID NO: 40660 - DNA, 30 bp, Artificial Sequence; identical to SEQ ID NO: 6308
  Probe

SEQ ID NO: 40661 - DNA, 50 bp, Artificial Sequence
  Probe
gcttagcatgcatgaggtcccgggttcgatccccagcatctccagtgttt

SEQ ID NO: 40662 - DNA, 23 bp, Artificial Sequence
  Probe
gcttaggatgcgagaggtcccgg

SEQ ID NO: 40663 - DNA, 24 bp, Artificial Sequence
  Probe
gcttaggatgcgagaggtcccggg

SEQ ID NO: 40664 - DNA, 22 bp, Artificial Sequence
  Probe
gcttagggtgcgagaggtcccg

SEQ ID NO: 40665 - DNA, 23 bp, Artificial Sequence
  Probe
gcttagggtgcgagaggtcccgg

SEQ ID NO: 40666 - DNA, 25 bp, Artificial Sequence
  Probe
gcttagggtgcgagaggtcccgggt

SEQ ID NO: 40667 - DNA, 41 bp, Artificial Sequence
  Probe
gcttagggtgcgagaggtcccgggttcaaatcccggacgag

SEQ ID NO: 40668 - DNA, 42 bp, Artificial Sequence
  Probe
gcttagggtgcgagaggtcccgggttcaaatcccggacgagc

SEQ ID NO: 40669 - DNA, 34 bp, Artificial Sequence
  Probe
gcttccctggtggtctagtggttaggattcggcg

SEQ ID NO: 40670 - DNA, 22 bp, Artificial Sequence
  Probe
gcttcgggtgcgagaggtcccg

SEQ ID NO: 40671 - DNA, 23 bp, Artificial Sequence
  Probe
gcttcgggtgcgagaggtcccgg

SEQ ID NO: 40672 - DNA, 24 bp, Artificial Sequence
  Probe
gcttcgggtgcgagaggtcccggg

SEQ ID NO: 40673 - DNA, 25 bp, Artificial Sequence
  Probe
gcttcgggtgcgagaggtcccgggt

SEQ ID NO: 40674 - DNA, 41 bp, Artificial Sequence
  Probe
gcttcgggtgcgagaggtcccgggttcaaatcccggacgag

SEQ ID NO: 40675 - DNA, 42 bp, Artificial Sequence
  Probe
gcttcgggtgcgagaggtcccgggttcaaatcccggacgagc

SEQ ID NO: 40676 - DNA, 49 bp, Artificial Sequence
  Probe
gcttcgggtgcgagaggtcccgggttcaaatcccggacgagccctcctt

SEQ ID NO: 40677 - DNA, 50 bp, Artificial Sequence
  Probe
gcttcgggtgcgagaggtcccgggttcaaatcccggacgagccctccttt

SEQ ID NO: 40678 - DNA, 29 bp, Artificial Sequence
  Probe
gcttctgtaatgtagtggttatcacattc

SEQ ID NO: 40679 - DNA, 30 bp, Artificial Sequence
  Probe
gcttctgtaatgtagtggttatcacattcg

SEQ ID NO: 40680 - DNA, 31 bp, Artificial Sequence
  Probe
gcttctgtaatgtagtggttatcacattcgc

SEQ ID NO: 40681 - DNA, 23 bp, Artificial Sequence
  Probe
gcttctgtagtgtagtggttatc

SEQ ID NO: 40682 - DNA, 32 bp, Artificial Sequence; identical to SEQ ID NO: 1214
  Probe

SEQ ID NO: 40683 - DNA, 35 bp, Artificial Sequence; identical to SEQ ID NO: 1217
  Probe

SEQ ID NO: 40684 - DNA, 50 bp, Artificial Sequence
  Probe
gctttacacgcagaaggtcctgggttcaagccccagtggaaccatggtgt

SEQ ID NO: 40685 - DNA, 50 bp, Artificial Sequence; identical to SEQ ID NO: 21335
  Probe

SEQ ID NO: 40686 - DNA, 50 bp, Artificial Sequence
  Probe
gctttacacgcagaaggtcctgggttcgagccccagtggaaccatagccg

SEQ ID NO: 40687 - DNA, 50 bp, Artificial Sequence
  Probe
gctttacacgcagaaggtcctgggttcgagccccagtggaaccatgagat

SEQ ID NO: 40688 - DNA, 41 bp, Artificial Sequence
  Probe
gctttcaccgccgcggcccgggttcgattcccggtcaggga

SEQ ID NO: 40689 - DNA, 42 bp, Artificial Sequence
  Probe
gctttcaccgccgcggcccgggttcgattcccggtcagggaa

SEQ ID NO: 40690 - DNA, 45 bp, Artificial Sequence
  Probe
gctttcaccgccgcggcccgggttcgattcccggtcagggaattg

SEQ ID NO: 40691 - DNA, 50 bp, Artificial Sequence
  Probe
gctttcaccgccgcggcccgggttcgattcccggtcagggaattgtttta

SEQ ID NO: 40692 - DNA, 18 bp, Artificial Sequence
  Probe
gctttgcacgtatgaggc

SEQ ID NO: 40693 - DNA, 21 bp, Artificial Sequence
  Probe
gctttgcacgtatgaggcccc

SEQ ID NO: 40694 - DNA, 23 bp, Artificial Sequence
  Probe
gctttgcacgtatgaggccccgg

SEQ ID NO: 40695 - DNA, 24 bp, Artificial Sequence
  Probe
gctttgcacgtatgaggccccggg

SEQ ID NO: 40696 - DNA, 50 bp, Artificial Sequence
  Probe
gctttgcacgtatgaggccccgggttcaatccccggcatctccagacttt

SEQ ID NO: 40697 - DNA, 50 bp, Artificial Sequence
  Probe
gctttgcatgtatgaggccccgggttcgatccccggcatctccattgtag

SEQ ID NO: 40698 - DNA, 31 bp, Artificial Sequence; identical to SEQ ID NO: 6328
  Probe

SEQ ID NO: 40699 - DNA, 32 bp, Artificial Sequence; identical to SEQ ID NO: 6329
  Probe

SEQ ID NO: 40700 - DNA, 33 bp, Artificial Sequence; identical to SEQ ID NO: 6330
  Probe

SEQ ID NO: 40701 - DNA, 34 bp, Artificial Sequence; identical to SEQ ID NO: 21347
  Probe

SEQ ID NO: 40702 - DNA, 35 bp, Artificial Sequence
  Probe
gctttggggggttcgattccttccttttttgtcta

SEQ ID NO: 40703 - DNA, 23 bp, Artificial Sequence
  Probe
gctttgggtgcgagaggtcccgg

SEQ ID NO: 40704 - DNA, 41 bp, Artificial Sequence
  Probe
gctttgggtgcgagaggtcccgggttcaaatcccggacgag

SEQ ID NO: 40705 - DNA, 42 bp, Artificial Sequence
  Probe
gctttgggtgcgagaggtcccgggttcaaatcccggacgagc

SEQ ID NO: 40706 - DNA, 50 bp, Artificial Sequence
  Probe
gctttgggtgcgagaggtcccgggttcaaatcccggacgagccccctttt

SEQ ID NO: 40707 - DNA, 50 bp, Artificial Sequence
  Probe
gctttgggtgcgagaggtcccgggttcaaatcccggacgagcccctttac

SEQ ID NO: 40708 - DNA, 33 bp, Artificial Sequence; identical to SEQ ID NO: 1226
  Probe

SEQ ID NO: 40709 - DNA, 35 bp, Artificial Sequence; identical to SEQ ID NO: 1228
  Probe

SEQ ID NO: 40710 - DNA, 30 bp, Artificial Sequence; identical to SEQ ID NO: 6337
  Probe

SEQ ID NO: 40711 - DNA, 42 bp, Artificial Sequence; identical to SEQ ID NO: 13734
  Probe

SEQ ID NO: 40712 - DNA, 45 bp, Artificial Sequence; identical to SEQ ID NO: 6343
  Probe

SEQ ID NO: 40713 - DNA, 30 bp, Artificial Sequence; identical to SEQ ID NO: 1235
  Probe

SEQ ID NO: 40714 - DNA, 34 bp, Artificial Sequence; identical to SEQ ID NO: 6346
  Probe

SEQ ID NO: 40715 - DNA, 25 bp, Artificial Sequence
  Probe
ggagaccggggttcgattccccgac

SEQ ID NO: 40716 - DNA, 32 bp, Artificial Sequence; identical to SEQ ID NO: 6348
  Probe

SEQ ID NO: 40717 - DNA, 32 bp, Artificial Sequence; identical to SEQ ID NO: 6353
  Probe

SEQ ID NO: 40718 - DNA, 34 bp, Artificial Sequence; identical to SEQ ID NO: 6355
  Probe

SEQ ID NO: 40719 - DNA, 29 bp, Artificial Sequence
  Probe
ggagatgaaaacctttttccaaggacaaa

SEQ ID NO: 40720 - DNA, 30 bp, Artificial Sequence; identical to SEQ ID NO: 6362
  Probe

SEQ ID NO: 40721 - DNA, 31 bp, Artificial Sequence; identical to SEQ ID NO: 6363
  Probe

SEQ ID NO: 40722 - DNA, 27 bp, Artificial Sequence
  Probe
ggagatttcaacttaacttgaccgctc

SEQ ID NO: 40723 - DNA, 32 bp, Artificial Sequence; identical to SEQ ID NO: 6374
  Probe

SEQ ID NO: 40724 - DNA, 33 bp, Artificial Sequence; identical to SEQ ID NO: 6375
  Probe

SEQ ID NO: 40725 - DNA, 39 bp, Artificial Sequence; identical to SEQ ID NO: 21433
  Probe

SEQ ID NO: 40726 - DNA, 35 bp, Artificial Sequence; identical to SEQ ID NO: 21446
  Probe

SEQ ID NO: 40727 - DNA, 36 bp, Artificial Sequence; identical to SEQ ID NO: 32201
  Probe

SEQ ID NO: 40728 - DNA, 37 bp, Artificial Sequence
  Probe
ggagctccagtggcgcaatcggttagcgcgcggtact

SEQ ID NO: 40729 - DNA, 41 bp, Artificial Sequence; identical to SEQ ID NO: 21450
  Probe

SEQ ID NO: 40730 - DNA, 30 bp, Artificial Sequence
  Probe
ggaggcccgggttcgattcccggccaatgc

SEQ ID NO: 40731 - DNA, 29 bp, Artificial Sequence
  Probe
ggaggcccgggttcgattcccggcccatg

SEQ ID NO: 40732 - DNA, 30 bp, Artificial Sequence
  Probe
ggaggcccgggttcgattcccggcccatgc

SEQ ID NO: 40733 - DNA, 26 bp, Artificial Sequence
  Probe
ggagttaaagactttttctctgattt

SEQ ID NO: 40734 - DNA, 27 bp, Artificial Sequence
  Probe
ggatagctcagtcggtagagcatcaga

SEQ ID NO: 40735 - DNA, 31 bp, Artificial Sequence; identical to SEQ ID NO: 1252
  Probe

SEQ ID NO: 40736 - DNA, 32 bp, Artificial Sequence; identical to SEQ ID NO: 1253
  Probe

SEQ ID NO: 40737 - DNA, 19 bp, Artificial Sequence
  Probe
ggatcagaagattgagggt

SEQ ID NO: 40738 - DNA, 28 bp, Artificial Sequence
  Probe
ggatgccatagtggggcccttcacttac

SEQ ID NO: 40739 - DNA, 30 bp, Artificial Sequence; identical to SEQ ID NO: 21482
  Probe

SEQ ID NO: 40740 - DNA, 30 bp, Artificial Sequence
  Probe
ggattgaaacttttcgaaagtacgattact

SEQ ID NO: 40741 - DNA, 26 bp, Artificial Sequence
  Probe
ggattgtgggttcgagtcccatctgg

SEQ ID NO: 40742 - DNA, 30 bp, Artificial Sequence
  Probe
ggattgtgggttcgagtcccatctggggtg

SEQ ID NO: 40743 - DNA, 42 bp, Artificial Sequence
  Probe
ggattgtgggttcgagtcccatctggggtggcctgtgacttt

SEQ ID NO: 40744 - DNA, 27 bp, Artificial Sequence
  Probe
ggcagaaacagagcgtagtttcgtttt

SEQ ID NO: 40745 - DNA, 30 bp, Artificial Sequence
  Probe
ggcattggtggttcagtggtagaattctcg

SEQ ID NO: 40746 - DNA, 19 bp, Artificial Sequence
  Probe
ggcccataacccagaggtc

SEQ ID NO: 40747 - DNA, 25 bp, Artificial Sequence
  Probe
ggcccataacccagaggtcgatgga

SEQ ID NO: 40748 - DNA, 50 bp, Artificial Sequence
  Probe
ggcccataacccagaggtcgatggatcgaaaccatcctctgctagggagc

SEQ ID NO: 40749 - DNA, 49 bp, Artificial Sequence
  Probe
ggcccataacccagaggtcgatggatcgaaaccatcctctgctaggtgc

SEQ ID NO: 40750 - DNA, 50 bp, Artificial Sequence; identical to SEQ ID NO: 6398
  Probe

SEQ ID NO: 40751 - DNA, 50 bp, Artificial Sequence
  Probe
ggcccataacccagaggtcgatggatcgaaaccatcctctgctatatggc

SEQ ID NO: 40752 - DNA, 46 bp, Artificial Sequence
  Probe
ggcccataacccagaggtcgatggatcgaaaccatcctctgctatc

SEQ ID NO: 40753 - DNA, 50 bp, Artificial Sequence
  Probe
ggcccataacccagaggtcgatggatcgaaaccatcctctgctatcggag

SEQ ID NO: 40754 - DNA, 50 bp, Artificial Sequence
  Probe
ggcccataacccagaggtcgatggatcgaaaccatcctctgctatttttt

SEQ ID NO: 40755 - DNA, 45 bp, Artificial Sequence; identical to SEQ ID NO: 6422
  Probe

SEQ ID NO: 40756 - DNA, 36 bp, Artificial Sequence
  Probe
ggcccatggggatatagctcaggggtagagcatttg

SEQ ID NO: 40757 - DNA, 24 bp, Artificial Sequence
  Probe
ggccccatggtgtaatggtcagca

SEQ ID NO: 40758 - DNA, 34 bp, Artificial Sequence
  Probe
ggccccatggtgtaatggtcagcactctggactc

SEQ ID NO: 40759 - DNA, 50 bp, Artificial Sequence
  Probe
ggccccatggtgtaatggtcagcactctggactctgaatccagcgatccg

SEQ ID NO: 40760 - DNA, 23 bp, Artificial Sequence
  Probe
ggccccatggtgtaatggttagc

SEQ ID NO: 40761 - DNA, 26 bp, Artificial Sequence
  Probe
ggccccatggtgtaatggttagcact

SEQ ID NO: 40762 - DNA, 32 bp, Artificial Sequence; identical to SEQ ID NO: 1262
  Probe

SEQ ID NO: 40763 - DNA, 33 bp, Artificial Sequence; identical to SEQ ID NO: 1263
  Probe

SEQ ID NO: 40764 - DNA, 37 bp, Artificial Sequence; identical to SEQ ID NO: 1265
  Probe

SEQ ID NO: 40765 - DNA, 49 bp, Artificial Sequence
  Probe
ggccccatggtgtaatggttagcactctggactttgaatccagcgatcc

SEQ ID NO: 40766 - DNA, 32 bp, Artificial Sequence; identical to SEQ ID NO: 6430
  Probe

SEQ ID NO: 40767 - DNA, 36 bp, Artificial Sequence; identical to SEQ ID NO: 21552
  Probe

SEQ ID NO: 40768 - DNA, 37 bp, Artificial Sequence; identical to SEQ ID NO: 21553
  Probe

SEQ ID NO: 40769 - DNA, 31 bp, Artificial Sequence; identical to SEQ ID NO: 6431
  Probe

SEQ ID NO: 40770 - DNA, 42 bp, Artificial Sequence; identical to SEQ ID NO: 21557
  Probe

SEQ ID NO: 40771 - DNA, 21 bp, Artificial Sequence
  Probe
ggcccgggttcgattcccggc

SEQ ID NO: 40772 - DNA, 18 bp, Artificial Sequence
  Probe
ggccctatagctcagggg

SEQ ID NO: 40773 - DNA, 19 bp, Artificial Sequence
  Probe
ggccctatagctcaggggt

SEQ ID NO: 40774 - DNA, 32 bp, Artificial Sequence; identical to SEQ ID NO: 1269
  Probe

SEQ ID NO: 40775 - DNA, 50 bp, Artificial Sequence; identical to SEQ ID NO: 1272
  Probe

SEQ ID NO: 40776 - DNA, 30 bp, Artificial Sequence; identical to SEQ ID NO: 8656
  Probe

SEQ ID NO: 40777 - DNA, 31 bp, Artificial Sequence
  Probe
ggccggttagctcagtcggctagagcgtggt

SEQ ID NO: 40778 - DNA, 32 bp, Artificial Sequence
  Probe
ggccggttagctcagtcggctagagcgtggtg

SEQ ID NO: 40779 - DNA, 20 bp, Artificial Sequence
  Probe
ggccggttagctcagttggt

SEQ ID NO: 40780 - DNA, 21 bp, Artificial Sequence
  Probe
ggccggttagctcagttggtt

SEQ ID NO: 40781 - DNA, 24 bp, Artificial Sequence
  Probe
ggccggttagctcagttggttaga

SEQ ID NO: 40782 - DNA, 25 bp, Artificial Sequence
  Probe
ggccggttagctcagttggttagag

SEQ ID NO: 40783 - DNA, 26 bp, Artificial Sequence
  Probe
ggccggttagctcagttggttagagc

SEQ ID NO: 40784 - DNA, 31 bp, Artificial Sequence
  Probe
ggccggttagctcagttggttagagcgtggt

SEQ ID NO: 40785 - DNA, 32 bp, Artificial Sequence; identical to SEQ ID NO: 21581
  Probe

SEQ ID NO: 40786 - DNA, 18 bp, Artificial Sequence
  Probe
ggcgatcacgtagatttt

SEQ ID NO: 40787 - DNA, 22 bp, Artificial Sequence
  Probe
ggcgatcacgtagattttgttt

SEQ ID NO: 40788 - DNA, 27 bp, Artificial Sequence
  Probe
ggcggaaacacactaaaaaatcccttt

SEQ ID NO: 40789 - DNA, 30 bp, Artificial Sequence; identical to SEQ ID NO: 1278
  Probe

SEQ ID NO: 40790 - DNA, 31 bp, Artificial Sequence; identical to SEQ ID NO: 1279
  Probe

SEQ ID NO: 40791 - DNA, 18 bp, Artificial Sequence
  Probe
ggcgtgattcataccttt

SEQ ID NO: 40792 - DNA, 19 bp, Artificial Sequence
  Probe
ggcgtgattcatacctttt

SEQ ID NO: 40793 - DNA, 20 bp, Artificial Sequence
  Probe
ggcgtgattcataccttttt

SEQ ID NO: 40794 - DNA, 24 bp, Artificial Sequence
  Probe
ggctaaatcctatatatcttaatg

SEQ ID NO: 40795 - DNA, 25 bp, Artificial Sequence
  Probe
ggctagctcagtcggtagagcatga

SEQ ID NO: 40796 - DNA, 27 bp, Artificial Sequence
  Probe
ggctagctcagtcggtagagcatgaga

SEQ ID NO: 40797 - DNA, 30 bp, Artificial Sequence; identical to SEQ ID NO: 1285
  Probe

SEQ ID NO: 40798 - DNA, 18 bp, Artificial Sequence
  Probe
ggctcacatcaccccata

SEQ ID NO: 40799 - DNA, 24 bp, Artificial Sequence
  Probe
ggctcacatcaccccataaacaaa

SEQ ID NO: 40800 - DNA, 25 bp, Artificial Sequence
  Probe
ggctcacatcaccccataaacaaat

SEQ ID NO: 40801 - DNA, 19 bp, Artificial Sequence
  Probe
ggctccatagctcaggggt

SEQ ID NO: 40802 - DNA, 20 bp, Artificial Sequence
  Probe
ggctccatagctcaggggtt

SEQ ID NO: 40803 - DNA, 26 bp, Artificial Sequence
  Probe
ggctccatagctcaggggttagagca

SEQ ID NO: 40804 - DNA, 28 bp, Artificial Sequence
  Probe
ggctccatagctcaggggttagagcact

SEQ ID NO: 40805 - DNA, 29 bp, Artificial Sequence
  Probe
ggctccatagctcaggggttagagcactg

SEQ ID NO: 40806 - DNA, 30 bp, Artificial Sequence; identical to SEQ ID NO: 10696
  Probe

SEQ ID NO: 40807 - DNA, 31 bp, Artificial Sequence; identical to SEQ ID NO: 6482
  Probe

SEQ ID NO: 40808 - DNA, 32 bp, Artificial Sequence; identical to SEQ ID NO: 6483
  Probe

SEQ ID NO: 40809 - DNA, 33 bp, Artificial Sequence; identical to SEQ ID NO: 6484
  Probe

SEQ ID NO: 40810 - DNA, 49 bp, Artificial Sequence; identical to SEQ ID NO: 6490
  Probe

SEQ ID NO: 40811 - DNA, 26 bp, Artificial Sequence
  Probe
ggctccatagctcagtggttagagca

SEQ ID NO: 40812 - DNA, 32 bp, Artificial Sequence; identical to SEQ ID NO: 1299
  Probe

SEQ ID NO: 40813 - DNA, 50 bp, Artificial Sequence
  Probe
ggctccatagctcagtggttagagcactggtcttgtaaaccaggggtcgc

SEQ ID NO: 40814 - DNA, 31 bp, Artificial Sequence
  Probe
ggctccgtagcttagttggttaaagcgcctg

SEQ ID NO: 40815 - DNA, 29 bp, Artificial Sequence
  Probe
ggctccgtggcgcaatggatagcgcattg

SEQ ID NO: 40816 - DNA, 31 bp, Artificial Sequence; identical to SEQ ID NO: 21644
  Probe

SEQ ID NO: 40817 - DNA, 33 bp, Artificial Sequence; identical to SEQ ID NO: 6492
  Probe

SEQ ID NO: 40818 - DNA, 34 bp, Artificial Sequence
  Probe
ggctccgtggcgcaatggatagcgcattggactt

SEQ ID NO: 40819 - DNA, 37 bp, Artificial Sequence
  Probe
ggctccgtggcgcaatggatagcgcattggacttcta

SEQ ID NO: 40820 - DNA, 19 bp, Artificial Sequence
  Probe
ggctcgttggtctaggggt

SEQ ID NO: 40821 - DNA, 20 bp, Artificial Sequence
  Probe
ggctcgttggtctaggggta

SEQ ID NO: 40822 - DNA, 22 bp, Artificial Sequence
  Probe
ggctcgttggtctaggggtatg

SEQ ID NO: 40823 - DNA, 23 bp, Artificial Sequence
  Probe
ggctcgttggtctaggggtatga

SEQ ID NO: 40824 - DNA, 24 bp, Artificial Sequence
  Probe
ggctcgttggtctaggggtatgat

SEQ ID NO: 40825 - DNA, 25 bp, Artificial Sequence
  Probe
ggctcgttggtctaggggtatgatt

SEQ ID NO: 40826 - DNA, 26 bp, Artificial Sequence
  Probe
ggctcgttggtctaggggtatgattc

SEQ ID NO: 40827 - DNA, 27 bp, Artificial Sequence
  Probe
ggctcgttggtctaggggtatgattct

SEQ ID NO: 40828 - DNA, 28 bp, Artificial Sequence
  Probe
ggctcgttggtctaggggtatgattctc

SEQ ID NO: 40829 - DNA, 29 bp, Artificial Sequence
  Probe
ggctcgttggtctaggggtatgattctcg

SEQ ID NO: 40830 - DNA, 30 bp, Artificial Sequence; identical to SEQ ID NO: 6496
  Probe

SEQ ID NO: 40831 - DNA, 31 bp, Artificial Sequence; identical to SEQ ID NO: 6497
  Probe

SEQ ID NO: 40832 - DNA, 32 bp, Artificial Sequence; identical to SEQ ID NO: 6498
  Probe

SEQ ID NO: 40833 - DNA, 50 bp, Artificial Sequence; identical to SEQ ID NO: 32303
  Probe

SEQ ID NO: 40834 - DNA, 50 bp, Artificial Sequence; identical to SEQ ID NO: 32306
  Probe

SEQ ID NO: 40835 - DNA, 33 bp, Artificial Sequence; identical to SEQ ID NO: 1307
  Probe

SEQ ID NO: 40836 - DNA, 50 bp, Artificial Sequence; identical to SEQ ID NO: 32310
  Probe

SEQ ID NO: 40837 - DNA, 31 bp, Artificial Sequence; identical to SEQ ID NO: 6502
  Probe

SEQ ID NO: 40838 - DNA, 18 bp, Artificial Sequence
  Probe
ggctctgcctgccaactg

SEQ ID NO: 40839 - DNA, 29 bp, Artificial Sequence
  Probe
ggctctgtggcgcaatggatagcgcattg

SEQ ID NO: 40840 - DNA, 37 bp, Artificial Sequence
  Probe
ggctctgtggcgcaatggatagcgcattggacttcta

SEQ ID NO: 40841 - DNA, 23 bp, Artificial Sequence
  Probe
ggctgttaaccgaaagattggtg

SEQ ID NO: 40842 - DNA, 24 bp, Artificial Sequence
  Probe
ggctgttaaccgaaaggttggtgg

SEQ ID NO: 40843 - DNA, 27 bp, Artificial Sequence
  Probe
ggctgttaaccgaaaggttggtggttc

SEQ ID NO: 40844 - DNA, 50 bp, Artificial Sequence
  Probe
ggctgttaaccgaaaggttggtggttcgagcccacccagggacgcctctt

SEQ ID NO: 40845 - DNA, 23 bp, Artificial Sequence
  Probe
ggctgttaactaaaaggttggtg

SEQ ID NO: 40846 - DNA, 34 bp, Artificial Sequence; identical to SEQ ID NO: 21678
  Probe

SEQ ID NO: 40847 - DNA, 35 bp, Artificial Sequence
  Probe
ggcttgtcctcgttagtatagtggtgagtatcccc

SEQ ID NO: 40848 - DNA, 36 bp, Artificial Sequence; identical to SEQ ID NO: 21679
  Probe

SEQ ID NO: 40849 - DNA, 37 bp, Artificial Sequence
  Probe
ggcttgtcctcgttagtatagtggtgagtatccccgc

SEQ ID NO: 40850 - DNA, 41 bp, Artificial Sequence; identical to SEQ ID NO: 21682
  Probe

SEQ ID NO: 40851 - DNA, 42 bp, Artificial Sequence; identical to SEQ ID NO: 21683
  Probe

SEQ ID NO: 40852 - DNA, 30 bp, Artificial Sequence
  Probe
ggcttttggtgcagggtaaaagtcgtttcc

SEQ ID NO: 40853 - DNA, 50 bp, Artificial Sequence
  Probe
gggacgaggtggccgagtggttaaggcgatggactgctaatccattgtgc

SEQ ID NO: 40854 - DNA, 26 bp, Artificial Sequence
  Probe
gggagaccggggttcgattccccgac

SEQ ID NO: 40855 - DNA, 31 bp, Artificial Sequence; identical to SEQ ID NO: 1316
  Probe

SEQ ID NO: 40856 - DNA, 35 bp, Artificial Sequence; identical to SEQ ID NO: 6518
  Probe

SEQ ID NO: 40857 - DNA, 35 bp, Artificial Sequence; identical to SEQ ID NO: 6520
  Probe

SEQ ID NO: 40858 - DNA, 35 bp, Artificial Sequence; identical to SEQ ID NO: 6521
  Probe

SEQ ID NO: 40859 - DNA, 35 bp, Artificial Sequence; identical to SEQ ID NO: 21721
  Probe

SEQ ID NO: 40860 - DNA, 41 bp, Artificial Sequence; identical to SEQ ID NO: 21727
  Probe

SEQ ID NO: 40861 - DNA, 50 bp, Artificial Sequence
  Probe
gggagcccggatagctcagtcggtagagcatcagacttttaatctgaggg

SEQ ID NO: 40862 - DNA, 37 bp, Artificial Sequence; identical to SEQ ID NO: 21739
  Probe

SEQ ID NO: 40863 - DNA, 41 bp, Artificial Sequence; identical to SEQ ID NO: 21743
  Probe

SEQ ID NO: 40864 - DNA, 42 bp, Artificial Sequence; identical to SEQ ID NO: 21744
  Probe

SEQ ID NO: 40865 - DNA, 43 bp, Artificial Sequence; identical to SEQ ID NO: 21745
  Probe

SEQ ID NO: 40866 - DNA, 50 bp, Artificial Sequence; identical to SEQ ID NO: 21748
  Probe

SEQ ID NO: 40867 - DNA, 30 bp, Artificial Sequence; identical to SEQ ID NO: 21753
  Probe

SEQ ID NO: 40868 - DNA, 31 bp, Artificial Sequence; identical to SEQ ID NO: 6525
  Probe

SEQ ID NO: 40869 - DNA, 31 bp, Artificial Sequence; identical to SEQ ID NO: 6527
  Probe

SEQ ID NO: 40870 - DNA, 50 bp, Artificial Sequence; identical to SEQ ID NO: 21782
  Probe

SEQ ID NO: 40871 - DNA, 27 bp, Artificial Sequence
  Probe
gggattgtgggttcgagtcccacctgg

SEQ ID NO: 40872 - DNA, 31 bp, Artificial Sequence
  Probe
gggattgtgggttcgagtcccacctggggtg

SEQ ID NO: 40873 - DNA, 26 bp, Artificial Sequence
  Probe
gggattgtgggttcgagtcccatctg

SEQ ID NO: 40874 - DNA, 27 bp, Artificial Sequence
  Probe
gggattgtgggttcgagtcccatctgg

SEQ ID NO: 40875 - DNA, 28 bp, Artificial Sequence
  Probe
gggattgtgggttcgagtcccatctggg

SEQ ID NO: 40876 - DNA, 31 bp, Artificial Sequence; identical to SEQ ID NO: 6534
  Probe

SEQ ID NO: 40877 - DNA, 29 bp, Artificial Sequence
  Probe
gggattgtgggttcgagtcccatctgggt

SEQ ID NO: 40878 - DNA, 30 bp, Artificial Sequence
  Probe
gggattgtgggttcgagtcccatctgggtc

SEQ ID NO: 40879 - DNA, 31 bp, Artificial Sequence; identical to SEQ ID NO: 6536
  Probe

SEQ ID NO: 40880 - DNA, 50 bp, Artificial Sequence; identical to SEQ ID NO: 6540
  Probe

SEQ ID NO: 40881 - DNA, 38 bp, Artificial Sequence; identical to SEQ ID NO: 21819
  Probe

SEQ ID NO: 40882 - DNA, 41 bp, Artificial Sequence
  Probe
gggcgcccggctagctcagtcggtagagcatgagactctta

SEQ ID NO: 40883 - DNA, 50 bp, Artificial Sequence
  Probe
gggcgcccggctagctcagtcggtagagcatgagactcttaatctcaggg

SEQ ID NO: 40884 - DNA, 26 bp, Artificial Sequence
  Probe
gggctcacatcaccccataaacaaat

SEQ ID NO: 40885 - DNA, 23 bp, Artificial Sequence
  Probe
ggggaattagctcaaatggtaga

SEQ ID NO: 40886 - DNA, 24 bp, Artificial Sequence
  Probe
ggggaattagctcaaatggtagag

SEQ ID NO: 40887 - DNA, 30 bp, Artificial Sequence; identical to SEQ ID NO: 10769
  Probe

SEQ ID NO: 40888 - DNA, 50 bp, Artificial Sequence; identical to SEQ ID NO: 21843
  Probe

SEQ ID NO: 40889 - DNA, 23 bp, Artificial Sequence
  Probe
ggggatgtagctcagtggtagag

SEQ ID NO: 40890 - DNA, 24 bp, Artificial Sequence
  Probe
ggggatgtagctcagtggtagagc

SEQ ID NO: 40891 - DNA, 29 bp, Artificial Sequence
  Probe
ggggatgtagctcagtggtagagcgcgcg

SEQ ID NO: 40892 - DNA, 21 bp, Artificial Sequence
  Probe
gggggattagctcaaatggta

SEQ ID NO: 40893 - DNA, 24 bp, Artificial Sequence
  Probe
gggggattagctcaaatggtagag

SEQ ID NO: 40894 - DNA, 30 bp, Artificial Sequence; identical to SEQ ID NO: 10791
  Probe

SEQ ID NO: 40895 - DNA, 35 bp, Artificial Sequence; identical to SEQ ID NO: 1354
  Probe

SEQ ID NO: 40896 - DNA, 50 bp, Artificial Sequence
  Probe
ggggggtgtagctcagtggtagagcgcgtgcttagcatgcacgaggcccc

SEQ ID NO: 40897 - DNA, 25 bp, Artificial Sequence
  Probe
gggggtatagctcaggggtagagca

SEQ ID NO: 40898 - DNA, 28 bp, Artificial Sequence
  Probe
gggggtatagctcaggggtagagcactt

SEQ ID NO: 40899 - DNA, 30 bp, Artificial Sequence
  Probe
gggggtatagctcaggggtagagcacttga

SEQ ID NO: 40900 - DNA, 28 bp, Artificial Sequence
  Probe
gggggtatagctcaggggtagagcattt

SEQ ID NO: 40901 - DNA, 32 bp, Artificial Sequence; identical to SEQ ID NO: 1355
  Probe

SEQ ID NO: 40902 - DNA, 33 bp, Artificial Sequence; identical to SEQ ID NO: 1356
  Probe

SEQ ID NO: 40903 - DNA, 34 bp, Artificial Sequence; identical to SEQ ID NO: 1357
  Probe

SEQ ID NO: 40904 - DNA, 34 bp, Artificial Sequence; identical to SEQ ID NO: 13856
  Probe

SEQ ID NO: 40905 - DNA, 17 bp, Artificial Sequence
  Probe
gggggtatagctcagtg

SEQ ID NO: 40906 - DNA, 18 bp, Artificial Sequence
  Probe
gggggtatagctcagtgg

SEQ ID NO: 40907 - DNA, 34 bp, Artificial Sequence; identical to SEQ ID NO: 13861
  Probe

SEQ ID NO: 40908 - DNA, 35 bp, Artificial Sequence; identical to SEQ ID NO: 1358
  Probe

SEQ ID NO: 40909 - DNA, 20 bp, Artificial Sequence
  Probe
gggggtatagctcagtggta

SEQ ID NO: 40910 - DNA, 22 bp, Artificial Sequence
  Probe
gggggtatagctcagtggtaga

SEQ ID NO: 40911 - DNA, 23 bp, Artificial Sequence
  Probe
gggggtatagctcagtggtagag

SEQ ID NO: 40912 - DNA, 24 bp, Artificial Sequence
  Probe
gggggtatagctcagtggtagagc

SEQ ID NO: 40913 - DNA, 25 bp, Artificial Sequence
  Probe
gggggtatagctcagtggtagagca

SEQ ID NO: 40914 - DNA, 28 bp, Artificial Sequence
  Probe
gggggtatagctcagtggtagagcattt

SEQ ID NO: 40915 - DNA, 29 bp, Artificial Sequence
  Probe
gggggtatagctcagtggtagagcatttg

SEQ ID NO: 40916 - DNA, 30 bp, Artificial Sequence; identical to SEQ ID NO: 6598
  Probe

SEQ ID NO: 40917 - DNA, 31 bp, Artificial Sequence; identical to SEQ ID NO: 6599
  Probe

SEQ ID NO: 40918 - DNA, 32 bp, Artificial Sequence; identical to SEQ ID NO: 6600
  Probe

SEQ ID NO: 40919 - DNA, 33 bp, Artificial Sequence; identical to SEQ ID NO: 6601
  Probe

SEQ ID NO: 40920 - DNA, 34 bp, Artificial Sequence; identical to SEQ ID NO: 6602
  Probe

SEQ ID NO: 40921 - DNA, 35 bp, Artificial Sequence; identical to SEQ ID NO: 6603
  Probe

SEQ ID NO: 40922 - DNA, 28 bp, Artificial Sequence
  Probe
gggggtatagctcagtggtagagcgcgt

SEQ ID NO: 40923 - DNA, 29 bp, Artificial Sequence
  Probe
gggggtatagctcagtggtagagcgcgtg

SEQ ID NO: 40924 - DNA, 18 bp, Artificial Sequence
  Probe
gggggtgtagctcagtgg

SEQ ID NO: 40925 - DNA, 20 bp, Artificial Sequence
  Probe
gggggtgtagctcagtggta

SEQ ID NO: 40926 - DNA, 23 bp, Artificial Sequence
  Probe
gggggtgtagctcagtggtagag

SEQ ID NO: 40927 - DNA, 28 bp, Artificial Sequence
  Probe
gggggtgtagctcagtggtagagcacat

SEQ ID NO: 40928 - DNA, 33 bp, Artificial Sequence; identical to SEQ ID NO: 21922
  Probe

SEQ ID NO: 40929 - DNA, 35 bp, Artificial Sequence
  Probe
gggggtgtagctcagtggtagagcacatgctttgc

SEQ ID NO: 40930 - DNA, 30 bp, Artificial Sequence
  Probe
gggggtgtagctcagtggtagagcatttga

SEQ ID NO: 40931 - DNA, 29 bp, Artificial Sequence
  Probe
gggggtgtagctcagtggtagagcgcatg

SEQ ID NO: 40932 - DNA, 30 bp, Artificial Sequence
  Probe
gggggtgtagctcagtggtagagcgcatgc

SEQ ID NO: 40933 - DNA, 28 bp, Artificial Sequence
  Probe
ggggtatagctcagtggtagagcatttg

SEQ ID NO: 40934 - DNA, 29 bp, Artificial Sequence
  Probe
ggggtatagctcagtggtagagcatttga

SEQ ID NO: 40935 - DNA, 36 bp, Artificial Sequence; identical to SEQ ID NO: 21946
  Probe

SEQ ID NO: 40936 - DNA, 50 bp, Artificial Sequence; identical to SEQ ID NO: 21949
  Probe

SEQ ID NO: 40937 - DNA, 34 bp, Artificial Sequence
  Probe
gggtatgattctcgcttaggatgcgagaggtccc

SEQ ID NO: 40938 - DNA, 34 bp, Artificial Sequence; identical to SEQ ID NO: 21958
  Probe

SEQ ID NO: 40939 - DNA, 34 bp, Artificial Sequence; identical to SEQ ID NO: 13881
  Probe

SEQ ID NO: 40940 - DNA, 34 bp, Artificial Sequence; identical to SEQ ID NO: 21964
  Probe

SEQ ID NO: 40941 - DNA, 28 bp, Artificial Sequence
  Probe
gggtccagggttcaagtccctgttcggg

SEQ ID NO: 40942 - DNA, 38 bp, Artificial Sequence
  Probe
gggtcgcgagttcaattctcgctggggcctgtgtgttt

SEQ ID NO: 40943 - DNA, 30 bp, Artificial Sequence; identical to SEQ ID NO: 10861
  Probe

SEQ ID NO: 40944 - DNA, 50 bp, Artificial Sequence; identical to SEQ ID NO: 6656
  Probe

SEQ ID NO: 40945 - DNA, 34 bp, Artificial Sequence
  Probe
gggtggctctgtggcgcaatggatagcgcattgg

SEQ ID NO: 40946 - DNA, 41 bp, Artificial Sequence; identical to SEQ ID NO: 21998
  Probe

SEQ ID NO: 40947 - DNA, 50 bp, Artificial Sequence
  Probe
gggtggctctgtggcgcaatggatagcgcattggacttctagtgacgaat

SEQ ID NO: 40948 - DNA, 27 bp, Artificial Sequence
  Probe
gggttcctcgcagcttcgctgcgtgag

SEQ ID NO: 40949 - DNA, 26 bp, Artificial Sequence
  Probe
gggttcgattccccgacggggaggca

SEQ ID NO: 40950 - DNA, 31 bp, Artificial Sequence; identical to SEQ ID NO: 6689
  Probe

SEQ ID NO: 40951 - DNA, 32 bp, Artificial Sequence; identical to SEQ ID NO: 6690
  Probe

SEQ ID NO: 40952 - DNA, 33 bp, Artificial Sequence; identical to SEQ ID NO: 6691
  Probe

SEQ ID NO: 40953 - DNA, 34 bp, Artificial Sequence; identical to SEQ ID NO: 6692
  Probe

SEQ ID NO: 40954 - DNA, 35 bp, Artificial Sequence; identical to SEQ ID NO: 6693
  Probe

SEQ ID NO: 40955 - DNA, 37 bp, Artificial Sequence; identical to SEQ ID NO: 6695
  Probe

SEQ ID NO: 40956 - DNA, 50 bp, Artificial Sequence; identical to SEQ ID NO: 32525
  Probe

SEQ ID NO: 40957 - DNA, 33 bp, Artificial Sequence; identical to SEQ ID NO: 13887
  Probe

SEQ ID NO: 40958 - DNA, 50 bp, Artificial Sequence; identical to SEQ ID NO: 6698
  Probe

SEQ ID NO: 40959 - DNA, 37 bp, Artificial Sequence; identical to SEQ ID NO: 13893
  Probe

SEQ ID NO: 40960 - DNA, 18 bp, Artificial Sequence
  Probe
ggtagcgtggccgagcgg

SEQ ID NO: 40961 - DNA, 23 bp, Artificial Sequence
  Probe
ggtagcgtggccgagcggtctaa

SEQ ID NO: 40962 - DNA, 25 bp, Artificial Sequence
  Probe
ggtagcgtggccgagcggtctaagg

SEQ ID NO: 40963 - DNA, 29 bp, Artificial Sequence
  Probe
ggtagcgtggccgagcggtctaaggcgct

SEQ ID NO: 40964 - DNA, 31 bp, Artificial Sequence
  Probe
ggtagcgtggccgagcggtctaaggcgctgg

SEQ ID NO: 40965 - DNA, 25 bp, Artificial Sequence
  Probe
ggtagcgtggccgagtggtctaagg

SEQ ID NO: 40966 - DNA, 21 bp, Artificial Sequence
  Probe
ggtatagtggtaagcatagct

SEQ ID NO: 40967 - DNA, 22 bp, Artificial Sequence
  Probe
ggtatagtggtaagcatagctg

SEQ ID NO: 40968 - DNA, 22 bp, Artificial Sequence
  Probe
ggtatagtggtgagcatagctg

SEQ ID NO: 40969 - DNA, 21 bp, Artificial Sequence
  Probe
ggtatagtggttagcatagct

SEQ ID NO: 40970 - DNA, 22 bp, Artificial Sequence
  Probe
ggtatagtggttagcatagctg

SEQ ID NO: 40971 - DNA, 33 bp, Artificial Sequence; identical to SEQ ID NO: 6726
  Probe

SEQ ID NO: 40972 - DNA, 50 bp, Artificial Sequence; identical to SEQ ID NO: 1410
  Probe

SEQ ID NO: 40973 - DNA, 30 bp, Artificial Sequence
  Probe
ggtcagctgtttttcctaaccggagagtaa

SEQ ID NO: 40974 - DNA, 23 bp, Artificial Sequence
  Probe
ggtcccatggtgtaatggttagc

SEQ ID NO: 40975 - DNA, 24 bp, Artificial Sequence
  Probe
ggtcccatggtgtaatggttagca

SEQ ID NO: 40976 - DNA, 26 bp, Artificial Sequence
  Probe
ggtcccatggtgtaatggttagcact

SEQ ID NO: 40977 - DNA, 32 bp, Artificial Sequence; identical to SEQ ID NO: 1414
  Probe

SEQ ID NO: 40978 - DNA, 33 bp, Artificial Sequence; identical to SEQ ID NO: 1415
  Probe

SEQ ID NO: 40979 - DNA, 32 bp, Artificial Sequence; identical to SEQ ID NO: 6752
  Probe

SEQ ID NO: 40980 - DNA, 32 bp, Artificial Sequence; identical to SEQ ID NO: 22153
  Probe

SEQ ID NO: 40981 - DNA, 21 bp, Artificial Sequence
  Probe
ggtcctagcctttctattagc

SEQ ID NO: 40982 - DNA, 31 bp, Artificial Sequence
  Probe
ggtcctcgttagtatagtggtgagtatcccc

SEQ ID NO: 40983 - DNA, 27 bp, Artificial Sequence
  Probe
ggtcctgggttcgagccccagtggaac

SEQ ID NO: 40984 - DNA, 32 bp, Artificial Sequence; identical to SEQ ID NO: 6754
  Probe

SEQ ID NO: 40985 - DNA, 50 bp, Artificial Sequence
  Probe
ggtcggccggttagctcagttggttagagcgtgctgctactaatgccagg

SEQ ID NO: 40986 - DNA, 24 bp, Artificial Sequence
  Probe
ggtcgtggttgtagtccgtgcgag

SEQ ID NO: 40987 - DNA, 28 bp, Artificial Sequence
  Probe
ggtcgtggttgtagtccgtgcgagaata

SEQ ID NO: 40988 - DNA, 31 bp, Artificial Sequence; identical to SEQ ID NO: 6765
  Probe

SEQ ID NO: 40989 - DNA, 21 bp, Artificial Sequence
  Probe
ggtctagcggttaggattcct

SEQ ID NO: 40990 - DNA, 20 bp, Artificial Sequence
  Probe
ggtctagtggttaggattcg

SEQ ID NO: 40991 - DNA, 21 bp, Artificial Sequence
  Probe
ggtctagtggttaggattcgg

SEQ ID NO: 40992 - DNA, 33 bp, Artificial Sequence; identical to SEQ ID NO: 13931
  Probe

SEQ ID NO: 40993 - DNA, 34 bp, Artificial Sequence; identical to SEQ ID NO: 13935
  Probe

SEQ ID NO: 40994 - DNA, 37 bp, Artificial Sequence; identical to SEQ ID NO: 13936
  Probe

SEQ ID NO: 40995 - DNA, 50 bp, Artificial Sequence
  Probe
ggtgagtatccccgcctgtcacgcgggagaccggggttcgattccccgac

SEQ ID NO: 40996 - DNA, 32 bp, Artificial Sequence; identical to SEQ ID NO: 22202
  Probe

SEQ ID NO: 40997 - DNA, 35 bp, Artificial Sequence; identical to SEQ ID NO: 32616
  Probe

SEQ ID NO: 40998 - DNA, 22 bp, Artificial Sequence
  Probe
ggtgcccccttcccggatgttt

SEQ ID NO: 40999 - DNA, 23 bp, Artificial Sequence
  Probe
ggtgcccccttcccggatgtttt

SEQ ID NO: 41000 - DNA, 18 bp, Artificial Sequence
  Probe
ggtgcgagaggtcccggg

SEQ ID NO: 41001 - DNA, 35 bp, Artificial Sequence
  Probe
ggtgcgagaggtcccgggttcaaatcccggacgag

SEQ ID NO: 41002 - DNA, 50 bp, Artificial Sequence; identical to SEQ ID NO: 6773
  Probe

SEQ ID NO: 41003 - DNA, 29 bp, Artificial Sequence
  Probe
ggtggagttaaagactttttctctgattt

SEQ ID NO: 41004 - DNA, 50 bp, Artificial Sequence
  Probe
ggtggcacggagaattttggattctcagggatgggttcgattctcatagt

SEQ ID NO: 41005 - DNA, 28 bp, Artificial Sequence
  Probe
ggtggcccgggttcgactcccggtatgg

SEQ ID NO: 41006 - DNA, 30 bp, Artificial Sequence; identical to SEQ ID NO: 22215
  Probe

SEQ ID NO: 41007 - DNA, 34 bp, Artificial Sequence; identical to SEQ ID NO: 22217
  Probe

SEQ ID NO: 41008 - DNA, 22 bp, Artificial Sequence
  Probe
ggtgggacctcacgagactttt

SEQ ID NO: 41009 - DNA, 24 bp, Artificial Sequence
  Probe
ggtggtatagtggtaagcatagct

SEQ ID NO: 41010 - DNA, 25 bp, Artificial Sequence
  Probe
ggtggtatagtggtaagcatagctg

SEQ ID NO: 41011 - DNA, 25 bp, Artificial Sequence
  Probe
ggtggtatagtggtgagcatagctg

SEQ ID NO: 41012 - DNA, 24 bp, Artificial Sequence
  Probe
ggtggtatagtggttagcatagct

SEQ ID NO: 41013 - DNA, 25 bp, Artificial Sequence
  Probe
ggtggtatagtggttagcatagctg

SEQ ID NO: 41014 - DNA, 20 bp, Artificial Sequence
  Probe
ggtggtctagtggctaggat

SEQ ID NO: 41015 - DNA, 21 bp, Artificial Sequence
  Probe
ggtggtctagtggctaggatt

SEQ ID NO: 41016 - DNA, 23 bp, Artificial Sequence
  Probe
ggtggtctagtggctaggattcg

SEQ ID NO: 41017 - DNA, 24 bp, Artificial Sequence
  Probe
ggtggtctagtggctaggattcgg

SEQ ID NO: 41018 - DNA, 18 bp, Artificial Sequence
  Probe
ggtggtctagtggttagg

SEQ ID NO: 41019 - DNA, 20 bp, Artificial Sequence
  Probe
ggtggtctagtggttaggat

SEQ ID NO: 41020 - DNA, 21 bp, Artificial Sequence
  Probe
ggtggtctagtggttaggatt

SEQ ID NO: 41021 - DNA, 22 bp, Artificial Sequence
  Probe
ggtggtctagtggttaggattc

SEQ ID NO: 41022 - DNA, 23 bp, Artificial Sequence
  Probe
ggtggtctagtggttaggattcg

SEQ ID NO: 41023 - DNA, 24 bp, Artificial Sequence
  Probe
ggtggtctagtggttaggattcgg

SEQ ID NO: 41024 - DNA, 20 bp, Artificial Sequence
  Probe
ggtggttcagtggtagaatt

SEQ ID NO: 41025 - DNA, 22 bp, Artificial Sequence
  Probe
ggtggttcagtggtagaattct

SEQ ID NO: 41026 - DNA, 23 bp, Artificial Sequence
  Probe
ggtggttcagtggtagaattctc

SEQ ID NO: 41027 - DNA, 24 bp, Artificial Sequence
  Probe
ggtggttcagtggtagaattctcg

SEQ ID NO: 41028 - DNA, 25 bp, Artificial Sequence
  Probe
ggtggttcagtggtagaattctcgc

SEQ ID NO: 41029 - DNA, 28 bp, Artificial Sequence
  Probe
ggtggttcagtggtagaattctcgcctc

SEQ ID NO: 41030 - DNA, 29 bp, Artificial Sequence
  Probe
ggtggttcagtggtagaattctcgcctcc

SEQ ID NO: 41031 - DNA, 30 bp, Artificial Sequence; identical to SEQ ID NO: 22239
  Probe

SEQ ID NO: 41032 - DNA, 33 bp, Artificial Sequence; identical to SEQ ID NO: 22258
  Probe

SEQ ID NO: 41033 - DNA, 21 bp, Artificial Sequence
  Probe
ggttcaatccccagcacctcc

SEQ ID NO: 41034 - DNA, 25 bp, Artificial Sequence
  Probe
ggttcaatccccggcacctccacca

SEQ ID NO: 41035 - DNA, 21 bp, Artificial Sequence
  Probe
ggttcagtggtagaattctcg

SEQ ID NO: 41036 - DNA, 18 bp, Artificial Sequence
  Probe
ggttccatagtgtagcgg

SEQ ID NO: 41037 - DNA, 21 bp, Artificial Sequence
  Probe
ggttccatagtgtagcggtta

SEQ ID NO: 41038 - DNA, 22 bp, Artificial Sequence
  Probe
ggttccatagtgtagcggttat

SEQ ID NO: 41039 - DNA, 32 bp, Artificial Sequence; identical to SEQ ID NO: 1433
  Probe

SEQ ID NO: 41040 - DNA, 33 bp, Artificial Sequence; identical to SEQ ID NO: 1434
  Probe

SEQ ID NO: 41041 - DNA, 22 bp, Artificial Sequence
  Probe
ggttccatagtgtagtggttat

SEQ ID NO: 41042 - DNA, 32 bp, Artificial Sequence; identical to SEQ ID NO: 1444
  Probe

SEQ ID NO: 41043 - DNA, 34 bp, Artificial Sequence; identical to SEQ ID NO: 1446
  Probe

SEQ ID NO: 41044 - DNA, 26 bp, Artificial Sequence
  Probe
ggttccatagtgtagtggttatcacg

SEQ ID NO: 41045 - DNA, 35 bp, Artificial Sequence; identical to SEQ ID NO: 6817
  Probe

SEQ ID NO: 41046 - DNA, 37 bp, Artificial Sequence; identical to SEQ ID NO: 6818
  Probe

SEQ ID NO: 41047 - DNA, 39 bp, Artificial Sequence; identical to SEQ ID NO: 6819
  Probe

SEQ ID NO: 41048 - DNA, 49 bp, Artificial Sequence; identical to SEQ ID NO: 22315
  Probe

SEQ ID NO: 41049 - DNA, 29 bp, Artificial Sequence
  Probe
ggttccatggtgtaatggtaagcactctg

SEQ ID NO: 41050 - DNA, 29 bp, Artificial Sequence
  Probe
ggttccatggtgtaatggtgagcactctg

SEQ ID NO: 41051 - DNA, 22 bp, Artificial Sequence
  Probe
ggttccatggtgtaatggttag

SEQ ID NO: 41052 - DNA, 23 bp, Artificial Sequence
  Probe
ggttccatggtgtaatggttagc

SEQ ID NO: 41053 - DNA, 24 bp, Artificial Sequence
  Probe
ggttccatggtgtaatggttagca

SEQ ID NO: 41054 - DNA, 25 bp, Artificial Sequence
  Probe
ggttccatggtgtaatggttagcac

SEQ ID NO: 41055 - DNA, 26 bp, Artificial Sequence
  Probe
ggttccatggtgtaatggttagcact

SEQ ID NO: 41056 - DNA, 27 bp, Artificial Sequence
  Probe
ggttccatggtgtaatggttagcactc

SEQ ID NO: 41057 - DNA, 28 bp, Artificial Sequence
  Probe
ggttccatggtgtaatggttagcactct

SEQ ID NO: 41058 - DNA, 29 bp, Artificial Sequence
  Probe
ggttccatggtgtaatggttagcactctg

SEQ ID NO: 41059 - DNA, 31 bp, Artificial Sequence; identical to SEQ ID NO: 22321
  Probe

SEQ ID NO: 41060 - DNA, 34 bp, Artificial Sequence; identical to SEQ ID NO: 1459
  Probe

SEQ ID NO: 41061 - DNA, 37 bp, Artificial Sequence; identical to SEQ ID NO: 1461
  Probe

SEQ ID NO: 41062 - DNA, 32 bp, Artificial Sequence
  Probe
ggttcctcgttagtatagtggtgagtatcccc

SEQ ID NO: 41063 - DNA, 34 bp, Artificial Sequence
  Probe
ggttcgaatcccaccgctgccaggctggagtttt

SEQ ID NO: 41064 - DNA, 35 bp, Artificial Sequence
  Probe
ggttcgaatcccaccgctgccaggtgcttcccttt

SEQ ID NO: 41065 - DNA, 33 bp, Artificial Sequence
  Probe
ggttcgaatcccactcctgacagttcgtacttt

SEQ ID NO: 41066 - DNA, 21 bp, Artificial Sequence
  Probe
ggttcgaatcccacttctgac

SEQ ID NO: 41067 - DNA, 31 bp, Artificial Sequence
  Probe
ggttcgaatcccacttctgacacaactatct

SEQ ID NO: 41068 - DNA, 34 bp, Artificial Sequence
  Probe
ggttcgaatcccacttctgacacaactatcttat

SEQ ID NO: 41069 - DNA, 30 bp, Artificial Sequence
  Probe
ggttcgaatcccacttctgacacatacttt

SEQ ID NO: 41070 - DNA, 31 bp, Artificial Sequence
  Probe
ggttcgaatcccacttctgacacatactttt

SEQ ID NO: 41071 - DNA, 31 bp, Artificial Sequence
  Probe
ggttcgaatcccacttctgacacattcgttt

SEQ ID NO: 41072 - DNA, 21 bp, Artificial Sequence
  Probe
ggttcgaatcccagcggggcc

SEQ ID NO: 41073 - DNA, 25 bp, Artificial Sequence
  Probe
ggttcgaatcccagcggtgcctccg

SEQ ID NO: 41074 - DNA, 21 bp, Artificial Sequence
  Probe
ggttcgaatcccatcctcgtc

SEQ ID NO: 41075 - DNA, 31 bp, Artificial Sequence
  Probe
ggttcgagccccacgttgggcgctctggttt

SEQ ID NO: 41076 - DNA, 30 bp, Artificial Sequence
  Probe
ggttcgagccccacgttgggcgctgtgttt

SEQ ID NO: 41077 - DNA, 31 bp, Artificial Sequence
  Probe
ggttcgagccccacgttgggcgctgtgtttt

SEQ ID NO: 41078 - DNA, 31 bp, Artificial Sequence
  Probe
ggttcgagccccacgttgggcgggtttgttt

SEQ ID NO: 41079 - DNA, 34 bp, Artificial Sequence
  Probe
ggttcgagccccacgttgggcgtaatttcgcttt

SEQ ID NO: 41080 - DNA, 19 bp, Artificial Sequence
  Probe
ggttcgagccccagtggaa

SEQ ID NO: 41081 - DNA, 21 bp, Artificial Sequence
  Probe
ggttcgagccccagtggaacc

SEQ ID NO: 41082 - DNA, 25 bp, Artificial Sequence
  Probe
ggttcgagtcccttcgtggtcgttg

SEQ ID NO: 41083 - DNA, 20 bp, Artificial Sequence
  Probe
ggttcgatccccagcatctc

SEQ ID NO: 41084 - DNA, 22 bp, Artificial Sequence
  Probe
ggttcgatccccagcatctcca

SEQ ID NO: 41085 - DNA, 20 bp, Artificial Sequence
  Probe
ggttcgatccccggcacctc

SEQ ID NO: 41086 - DNA, 22 bp, Artificial Sequence
  Probe
ggttcgatccccggcatctcca

SEQ ID NO: 41087 - DNA, 25 bp, Artificial Sequence
  Probe
ggttcgatccccggcatctccattg

SEQ ID NO: 41088 - DNA, 25 bp, Artificial Sequence
  Probe
ggttcgattccccgacggggaggca

SEQ ID NO: 41089 - DNA, 24 bp, Artificial Sequence
  Probe
ggttcgattctcatagtcctagaa

SEQ ID NO: 41090 - DNA, 25 bp, Artificial Sequence
  Probe
ggttgtagtccgtgcgagaataatg

SEQ ID NO: 41091 - DNA, 30 bp, Artificial Sequence
  Probe
ggtttccgtagtgtagtggttatcacgttc

SEQ ID NO: 41092 - DNA, 32 bp, Artificial Sequence
  Probe
ggtttccgtagtgtagtggttatcacgttcgc

SEQ ID NO: 41093 - DNA, 50 bp, Artificial Sequence
  Probe
ggttttcacccaggcggcccgggttcgactcccggtgtgggaacgccgaa

SEQ ID NO: 41094 - DNA, 50 bp, Artificial Sequence
  Probe
ggttttcacccaggcggcccgggttcgactcccggtgtgggaatgactgg

SEQ ID NO: 41095 - DNA, 46 bp, Artificial Sequence
  Probe
ggttttcacccaggtggcccgggttcgactcccggtatgggaacaa

SEQ ID NO: 41096 - DNA, 36 bp, Artificial Sequence; identical to SEQ ID NO: 6870
  Probe

SEQ ID NO: 41097 - DNA, 20 bp, Artificial Sequence
  Probe
gtaaacaggagatcctgggt

SEQ ID NO: 41098 - DNA, 37 bp, Artificial Sequence; identical to SEQ ID NO: 6880
  Probe

SEQ ID NO: 41099 - DNA, 50 bp, Artificial Sequence; identical to SEQ ID NO: 6887
  Probe

SEQ ID NO: 41100 - DNA, 50 bp, Artificial Sequence; identical to SEQ ID NO: 6907
  Probe

SEQ ID NO: 41101 - DNA, 50 bp, Artificial Sequence; identical to SEQ ID NO: 6908
  Probe

SEQ ID NO: 41102 - DNA, 18 bp, Artificial Sequence
  Probe
gtaatggttagcactctg

SEQ ID NO: 41103 - DNA, 30 bp, Artificial Sequence; identical to SEQ ID NO: 22433
  Probe

SEQ ID NO: 41104 - DNA, 38 bp, Artificial Sequence; identical to SEQ ID NO: 22434
  Probe

SEQ ID NO: 41105 - DNA, 38 bp, Artificial Sequence; identical to SEQ ID NO: 6914
  Probe

SEQ ID NO: 41106 - DNA, 34 bp, Artificial Sequence
  Probe
gtacgcgttggtggtatagtggtgagcatagctg

SEQ ID NO: 41107 - DNA, 36 bp, Artificial Sequence; identical to SEQ ID NO: 22443
  Probe

SEQ ID NO: 41108 - DNA, 34 bp, Artificial Sequence
  Probe
gtagaggttccatagtgtagtggttatcacgtct

SEQ ID NO: 41109 - DNA, 34 bp, Artificial Sequence
  Probe
gtaggcagcgcgtcagtctcataatctgaaggtc

SEQ ID NO: 41110 - DNA, 21 bp, Artificial Sequence
  Probe
gtagtccgtgcgagaataatg

SEQ ID NO: 41111 - DNA, 23 bp, Artificial Sequence
  Probe
gtagtcgtggccgagtggttaag

SEQ ID NO: 41112 - DNA, 37 bp, Artificial Sequence
  Probe
gtagtcgtggccgagtggttaaggtgatggactagaa

SEQ ID NO: 41113 - DNA, 18 bp, Artificial Sequence
  Probe
gtagtggttatcacgtct

SEQ ID NO: 41114 - DNA, 18 bp, Artificial Sequence
  Probe
gtagtggttatcacgttc

SEQ ID NO: 41115 - DNA, 22 bp, Artificial Sequence
  Probe
gtagtgtagtggttatcacgtt

SEQ ID NO: 41116 - DNA, 23 bp, Artificial Sequence
  Probe
gtagtgtagtggttatcacgttc

SEQ ID NO: 41117 - DNA, 24 bp, Artificial Sequence
  Probe
gtagtgtagtggttatcacgttcg

SEQ ID NO: 41118 - DNA, 25 bp, Artificial Sequence
  Probe
gtagtgtagtggttatcacgttcgc

SEQ ID NO: 41119 - DNA, 30 bp, Artificial Sequence
  Probe
gtagttgataccacgttgtgtatcaccacc

SEQ ID NO: 41120 - DNA, 18 bp, Artificial Sequence
  Probe
gtatagtggtaagcatag

SEQ ID NO: 41121 - DNA, 20 bp, Artificial Sequence
  Probe
gtatagtggtaagcatagct

SEQ ID NO: 41122 - DNA, 21 bp, Artificial Sequence
  Probe
gtatagtggtaagcatagctg

SEQ ID NO: 41123 - DNA, 18 bp, Artificial Sequence
  Probe
gtatagtggtgagcatag

SEQ ID NO: 41124 - DNA, 21 bp, Artificial Sequence
  Probe
gtatagtggtgagcatagctg

SEQ ID NO: 41125 - DNA, 20 bp, Artificial Sequence
  Probe
gtatagtggtgagtatcccc

SEQ ID NO: 41126 - DNA, 21 bp, Artificial Sequence
  Probe
gtatagtggtgagtatccccg

SEQ ID NO: 41127 - DNA, 18 bp, Artificial Sequence
  Probe
gtatagtggttagcatag

SEQ ID NO: 41128 - DNA, 20 bp, Artificial Sequence
  Probe
gtatagtggttagcatagct

SEQ ID NO: 41129 - DNA, 21 bp, Artificial Sequence
  Probe
gtatagtggttagcatagctg

SEQ ID NO: 41130 - DNA, 20 bp, Artificial Sequence
  Probe
gtatagtggttagtactctg

SEQ ID NO: 41131 - DNA, 50 bp, Artificial Sequence
  Probe
gtatccccgcctgtcacgcgggagaccggggttcgattccccgacgggga

SEQ ID NO: 41132 - DNA, 38 bp, Artificial Sequence; identical to SEQ ID NO: 22492
  Probe

SEQ ID NO: 41133 - DNA, 34 bp, Artificial Sequence
  Probe
gtatgaggccccgggttcgatccccggcatctcc

SEQ ID NO: 41134 - DNA, 35 bp, Artificial Sequence; identical to SEQ ID NO: 22507
  Probe

SEQ ID NO: 41135 - DNA, 38 bp, Artificial Sequence; identical to SEQ ID NO: 6928
  Probe

SEQ ID NO: 41136 - DNA, 32 bp, Artificial Sequence; identical to SEQ ID NO: 6929
  Probe

SEQ ID NO: 41137 - DNA, 32 bp, Artificial Sequence; identical to SEQ ID NO: 6931
  Probe

SEQ ID NO: 41138 - DNA, 32 bp, Artificial Sequence; identical to SEQ ID NO: 1472
  Probe

SEQ ID NO: 41139 - DNA, 41 bp, Artificial Sequence; identical to SEQ ID NO: 22534
  Probe

SEQ ID NO: 41140 - DNA, 22 bp, Artificial Sequence
  Probe
gtcacctggcaggtgcctcttt

SEQ ID NO: 41141 - DNA, 23 bp, Artificial Sequence
  Probe
gtcacctggcaggtgcctctttt

SEQ ID NO: 41142 - DNA, 20 bp, Artificial Sequence
  Probe
gtcacgcgggagaccggggt

SEQ ID NO: 41143 - DNA, 36 bp, Artificial Sequence; identical to SEQ ID NO: 14028
  Probe

SEQ ID NO: 41144 - DNA, 38 bp, Artificial Sequence
  Probe
gtcacgcgggagaccggggttcaattccccgacgggga

SEQ ID NO: 41145 - DNA, 42 bp, Artificial Sequence; identical to SEQ ID NO: 6945
  Probe

SEQ ID NO: 41146 - DNA, 33 bp, Artificial Sequence; identical to SEQ ID NO: 14031
  Probe

SEQ ID NO: 41147 - DNA, 38 bp, Artificial Sequence; identical to SEQ ID NO: 22549
  Probe

SEQ ID NO: 41148 - DNA, 50 bp, Artificial Sequence
  Probe
gtcacgcgggagaccggggttcgattccccgacggggagaaaagttgctt

SEQ ID NO: 41149 - DNA, 42 bp, Artificial Sequence; identical to SEQ ID NO: 22552
  Probe

SEQ ID NO: 41150 - DNA, 42 bp, Artificial Sequence; identical to SEQ ID NO: 6950
  Probe

SEQ ID NO: 41151 - DNA, 50 bp, Artificial Sequence; identical to SEQ ID NO: 6952
  Probe

SEQ ID NO: 41152 - DNA, 23 bp, Artificial Sequence
  Probe
gtcagaggttcaattcctcttct

SEQ ID NO: 41153 - DNA, 25 bp, Artificial Sequence
  Probe
gtcagaggttcaattcctcttctta

SEQ ID NO: 41154 - DNA, 30 bp, Artificial Sequence; identical to SEQ ID NO: 22564
  Probe

SEQ ID NO: 41155 - DNA, 31 bp, Artificial Sequence; identical to SEQ ID NO: 6959
  Probe

SEQ ID NO: 41156 - DNA, 29 bp, Artificial Sequence
  Probe
gtcagctgtttttcctaaccggagagtaa

SEQ ID NO: 41157 - DNA, 19 bp, Artificial Sequence
  Probe
gtcaggatggccgagcggt

SEQ ID NO: 41158 - DNA, 20 bp, Artificial Sequence
  Probe
gtcaggatggccgagcggtc

SEQ ID NO: 41159 - DNA, 21 bp, Artificial Sequence
  Probe
gtcaggatggccgagcggtct

SEQ ID NO: 41160 - DNA, 22 bp, Artificial Sequence
  Probe
gtcaggatggccgagcggtcta

SEQ ID NO: 41161 - DNA, 23 bp, Artificial Sequence
  Probe
gtcaggatggccgagcggtctaa

SEQ ID NO: 41162 - DNA, 24 bp, Artificial Sequence
  Probe
gtcaggatggccgagcggtctaag

SEQ ID NO: 41163 - DNA, 25 bp, Artificial Sequence
  Probe
gtcaggatggccgagcggtctaagg

SEQ ID NO: 41164 - DNA, 30 bp, Artificial Sequence; identical to SEQ ID NO: 11220
  Probe

SEQ ID NO: 41165 - DNA, 50 bp, Artificial Sequence; identical to SEQ ID NO: 6992
  Probe

SEQ ID NO: 41166 - DNA, 19 bp, Artificial Sequence
  Probe
gtcaggatggccgagtggt

SEQ ID NO: 41167 - DNA, 20 bp, Artificial Sequence
  Probe
gtcaggatggccgagtggtc

SEQ ID NO: 41168 - DNA, 22 bp, Artificial Sequence
  Probe
gtcaggatggccgagtggtcta

SEQ ID NO: 41169 - DNA, 26 bp, Artificial Sequence
  Probe
gtcaggatggccgagtggtctaaggc

SEQ ID NO: 41170 - DNA, 31 bp, Artificial Sequence; identical to SEQ ID NO: 14043
  Probe

SEQ ID NO: 41171 - DNA, 50 bp, Artificial Sequence
  Probe
gtcaggatggccgagtggtctaaggcgccagactcaagcttggcttcctc

SEQ ID NO: 41172 - DNA, 30 bp, Artificial Sequence; identical to SEQ ID NO: 22605
  Probe

SEQ ID NO: 41173 - DNA, 28 bp, Artificial Sequence
  Probe
gtcccatggtgtaatggttagcactctg

SEQ ID NO: 41174 - DNA, 31 bp, Artificial Sequence; identical to SEQ ID NO: 22617
  Probe

SEQ ID NO: 41175 - DNA, 31 bp, Artificial Sequence; identical to SEQ ID NO: 7002
  Probe

SEQ ID NO: 41176 - DNA, 34 bp, Artificial Sequence; identical to SEQ ID NO: 22622
  Probe

SEQ ID NO: 41177 - DNA, 35 bp, Artificial Sequence; identical to SEQ ID NO: 22623
  Probe

SEQ ID NO: 41178 - DNA, 31 bp, Artificial Sequence
  Probe
gtcccgggttcgatccccggcatctccaagt

SEQ ID NO: 41179 - DNA, 33 bp, Artificial Sequence; identical to SEQ ID NO: 22629
  Probe

SEQ ID NO: 41180 - DNA, 34 bp, Artificial Sequence
  Probe
gtccctcctcgttagtatagtggtgagtatcccc

SEQ ID NO: 41181 - DNA, 35 bp, Artificial Sequence; identical to SEQ ID NO: 22630
  Probe

SEQ ID NO: 41182 - DNA, 36 bp, Artificial Sequence; identical to SEQ ID NO: 22631
  Probe

SEQ ID NO: 41183 - DNA, 37 bp, Artificial Sequence; identical to SEQ ID NO: 22632
  Probe

SEQ ID NO: 41184 - DNA, 38 bp, Artificial Sequence; identical to SEQ ID NO: 22633
  Probe

SEQ ID NO: 41185 - DNA, 39 bp, Artificial Sequence; identical to SEQ ID NO: 22634
  Probe

SEQ ID NO: 41186 - DNA, 42 bp, Artificial Sequence
  Probe
gtccctcctcgttagtatagtggtgagtatccccgcctgtca

SEQ ID NO: 41187 - DNA, 18 bp, Artificial Sequence
  Probe
gtccctgtccaggcgcta

SEQ ID NO: 41188 - DNA, 30 bp, Artificial Sequence
  Probe
gtcctcgttagtatagtggtgagtatcccc

SEQ ID NO: 41189 - DNA, 31 bp, Artificial Sequence
  Probe
gtcctcgttagtatagtggtgagtatccccg

SEQ ID NO: 41190 - DNA, 36 bp, Artificial Sequence; identical to SEQ ID NO: 22646
  Probe

SEQ ID NO: 41191 - DNA, 38 bp, Artificial Sequence; identical to SEQ ID NO: 22647
  Probe

SEQ ID NO: 41192 - DNA, 27 bp, Artificial Sequence
  Probe
gtccttggaaaaaggttttcatctccg

SEQ ID NO: 41193 - DNA, 18 bp, Artificial Sequence
  Probe
gtccttgtagtataaact

SEQ ID NO: 41194 - DNA, 26 bp, Artificial Sequence
  Probe
gtccttgtagtataaactaatacacc

SEQ ID NO: 41195 - DNA, 29 bp, Artificial Sequence
  Probe
gtccttgtagtataaactaatacaccagt

SEQ ID NO: 41196 - DNA, 30 bp, Artificial Sequence; identical to SEQ ID NO: 1487
  Probe

SEQ ID NO: 41197 - DNA, 31 bp, Artificial Sequence; identical to SEQ ID NO: 1488
  Probe

SEQ ID NO: 41198 - DNA, 32 bp, Artificial Sequence; identical to SEQ ID NO: 7010
  Probe

SEQ ID NO: 41199 - DNA, 33 bp, Artificial Sequence; identical to SEQ ID NO: 7011
  Probe

SEQ ID NO: 41200 - DNA, 34 bp, Artificial Sequence; identical to SEQ ID NO: 7012
  Probe

SEQ ID NO: 41201 - DNA, 35 bp, Artificial Sequence; identical to SEQ ID NO: 1492
  Probe

SEQ ID NO: 41202 - DNA, 32 bp, Artificial Sequence
  Probe
gtcgtcctcgttagtatagtggtgagtatccc

SEQ ID NO: 41203 - DNA, 33 bp, Artificial Sequence
  Probe
gtcgtcctcgttagtatagtggtgagtatcccc

SEQ ID NO: 41204 - DNA, 34 bp, Artificial Sequence
  Probe
gtcgtcctcgttagtatagtggtgagtatccccg

SEQ ID NO: 41205 - DNA, 35 bp, Artificial Sequence
  Probe
gtcgtcctcgttagtatagtggtgagtatccccgc

SEQ ID NO: 41206 - DNA, 36 bp, Artificial Sequence; identical to SEQ ID NO: 33024
  Probe

SEQ ID NO: 41207 - DNA, 37 bp, Artificial Sequence; identical to SEQ ID NO: 33025
  Probe

SEQ ID NO: 41208 - DNA, 38 bp, Artificial Sequence; identical to SEQ ID NO: 33026
  Probe

SEQ ID NO: 41209 - DNA, 41 bp, Artificial Sequence
  Probe
gtcgtcctcgttagtatagtggtgagtatccccgcctgtca

SEQ ID NO: 41210 - DNA, 30 bp, Artificial Sequence; identical to SEQ ID NO: 7024
  Probe

SEQ ID NO: 41211 - DNA, 28 bp, Artificial Sequence
  Probe
gtcgttagtctaggctgtcagctcttcc

SEQ ID NO: 41212 - DNA, 46 bp, Artificial Sequence
  Probe
gtctacgggagcccggatagctcagtcggtagagcatcagactttt

SEQ ID NO: 41213 - DNA, 50 bp, Artificial Sequence; identical to SEQ ID NO: 7030
  Probe

SEQ ID NO: 41214 - DNA, 18 bp, Artificial Sequence
  Probe
gtctaggggtatgattct

SEQ ID NO: 41215 - DNA, 20 bp, Artificial Sequence
  Probe
gtctaggggtatgattctcg

SEQ ID NO: 41216 - DNA, 20 bp, Artificial Sequence
  Probe
gtctagtggctaggattcgg

SEQ ID NO: 41217 - DNA, 17 bp, Artificial Sequence
  Probe
gtctagtggttaggatt

SEQ ID NO: 41218 - DNA, 19 bp, Artificial Sequence
  Probe
gtctagtggttaggattcg

SEQ ID NO: 41219 - DNA, 20 bp, Artificial Sequence
  Probe
gtctagtggttaggattcgg

SEQ ID NO: 41220 - DNA, 22 bp, Artificial Sequence
  Probe
gtctagtggttaggattcggcg

SEQ ID NO: 41221 - DNA, 18 bp, Artificial Sequence
  Probe
gtctcataatctgaaggt

SEQ ID NO: 41222 - DNA, 19 bp, Artificial Sequence
  Probe
gtctcataatctgaaggtc

SEQ ID NO: 41223 - DNA, 20 bp, Artificial Sequence
  Probe
gtctcataatctgaaggtcc

SEQ ID NO: 41224 - DNA, 21 bp, Artificial Sequence
  Probe
gtctcataatctgaaggtcct

SEQ ID NO: 41225 - DNA, 22 bp, Artificial Sequence
  Probe
gtctcataatctgaaggtcctg

SEQ ID NO: 41226 - DNA, 23 bp, Artificial Sequence
  Probe
gtctcataatctgaaggtcctga

SEQ ID NO: 41227 - DNA, 24 bp, Artificial Sequence
  Probe
gtctcataatctgaaggtcctgag

SEQ ID NO: 41228 - DNA, 25 bp, Artificial Sequence
  Probe
gtctcataatctgaaggtcctgagt

SEQ ID NO: 41229 - DNA, 27 bp, Artificial Sequence
  Probe
gtctcataatctgaaggtcctgagttc

SEQ ID NO: 41230 - DNA, 50 bp, Artificial Sequence
  Probe
gtctcataatctgaaggtcctgagttcgaacctcagagggggcagctgcc

SEQ ID NO: 41231 - DNA, 50 bp, Artificial Sequence
  Probe
gtctcataatctgaaggtcgtgagttcgatcctcacacggggcacaataa

SEQ ID NO: 41232 - DNA, 32 bp, Artificial Sequence
  Probe
gtctctgtggcgcaatcggttagcgcattcgg

SEQ ID NO: 41233 - DNA, 41 bp, Artificial Sequence
  Probe
gtctgtcacgcgggagaccggggttcgattccccgacgggg

SEQ ID NO: 41234 - DNA, 42 bp, Artificial Sequence
  Probe
gtctgtcacgcgggagaccggggttcgattccccgacgggga

SEQ ID NO: 41235 - DNA, 43 bp, Artificial Sequence
  Probe
gtctgtcacgcgggagaccggggttcgattccccgacggggag

SEQ ID NO: 41236 - DNA, 50 bp, Artificial Sequence
  Probe
gtctgtcacgcgggagaccggggttcgattccccgacggggagacgaagc

SEQ ID NO: 41237 - DNA, 18 bp, Artificial Sequence
  Probe
gtcttgtaaaccaggggt

SEQ ID NO: 41238 - DNA, 20 bp, Artificial Sequence
  Probe
gtcttgtaaaccaggggtcg

SEQ ID NO: 41239 - DNA, 22 bp, Artificial Sequence
  Probe
gtcttgtaaaccaggggtcgcg

SEQ ID NO: 41240 - DNA, 50 bp, Artificial Sequence
  Probe
gtcttgtaaaccaggggtcgcgagttcaattctcgctggggcctgtgtgt

SEQ ID NO: 41241 - DNA, 42 bp, Artificial Sequence; identical to SEQ ID NO: 7041
  Probe

SEQ ID NO: 41242 - DNA, 42 bp, Artificial Sequence; identical to SEQ ID NO: 7048
  Probe

SEQ ID NO: 41243 - DNA, 50 bp, Artificial Sequence; identical to SEQ ID NO: 22715
  Probe

SEQ ID NO: 41244 - DNA, 32 bp, Artificial Sequence
  Probe
gtgagaggtcccgggttcaaatcccggacgag

SEQ ID NO: 41245 - DNA, 35 bp, Artificial Sequence; identical to SEQ ID NO: 22723
  Probe

SEQ ID NO: 41246 - DNA, 41 bp, Artificial Sequence; identical to SEQ ID NO: 22729
  Probe

SEQ ID NO: 41247 - DNA, 50 bp, Artificial Sequence
  Probe
gtgagcccggatagctcagtcggtagagcatcagacttttaatctgaggg

SEQ ID NO: 41248 - DNA, 33 bp, Artificial Sequence
  Probe
gtgaggccctatagctcaggggttagagcactg

SEQ ID NO: 41249 - DNA, 50 bp, Artificial Sequence
  Probe
gtgaggccctatagctcaggggttagagcactggtcttgtaaaccagggg

SEQ ID NO: 41250 - DNA, 32 bp, Artificial Sequence; identical to SEQ ID NO: 22740
  Probe

SEQ ID NO: 41251 - DNA, 33 bp, Artificial Sequence; identical to SEQ ID NO: 14079
  Probe

SEQ ID NO: 41252 - DNA, 36 bp, Artificial Sequence; identical to SEQ ID NO: 22741
  Probe

SEQ ID NO: 41253 - DNA, 21 bp, Artificial Sequence
  Probe
gtgatcgtatagtggttagta

SEQ ID NO: 41254 - DNA, 22 bp, Artificial Sequence
  Probe
gtgatcgtatagtggttagtac

SEQ ID NO: 41255 - DNA, 23 bp, Artificial Sequence
  Probe
gtgatcgtatagtggttagtact

SEQ ID NO: 41256 - DNA, 26 bp, Artificial Sequence
  Probe
gtgatcgtatagtggttagtactctg

SEQ ID NO: 41257 - DNA, 27 bp, Artificial Sequence
  Probe
gtgatcgtatagtggttagtactctgc

SEQ ID NO: 41258 - DNA, 37 bp, Artificial Sequence; identical to SEQ ID NO: 22769
  Probe

SEQ ID NO: 41259 - DNA, 38 bp, Artificial Sequence; identical to SEQ ID NO: 22770
  Probe

SEQ ID NO: 41260 - DNA, 41 bp, Artificial Sequence; identical to SEQ ID NO: 22773
  Probe

SEQ ID NO: 41261 - DNA, 42 bp, Artificial Sequence; identical to SEQ ID NO: 22774
  Probe

SEQ ID NO: 41262 - DNA, 22 bp, Artificial Sequence
  Probe
gtgctccggagttacctcgttt

SEQ ID NO: 41263 - DNA, 50 bp, Artificial Sequence
  Probe
gtgcttagctgttaactaagtgtttgtgggtttaagtcccattggtctag

SEQ ID NO: 41264 - DNA, 50 bp, Artificial Sequence; identical to SEQ ID NO: 22784
  Probe

SEQ ID NO: 41265 - DNA, 28 bp, Artificial Sequence
  Probe
gtggagttaaagactttttctctgattt

SEQ ID NO: 41266 - DNA, 30 bp, Artificial Sequence; identical to SEQ ID NO: 22788
  Probe

SEQ ID NO: 41267 - DNA, 33 bp, Artificial Sequence; identical to SEQ ID NO: 7064
  Probe

SEQ ID NO: 41268 - DNA, 42 bp, Artificial Sequence
  Probe
gtggcccgggttcgactcccggtatgggaacgcttccttatt

SEQ ID NO: 41269 - DNA, 34 bp, Artificial Sequence
  Probe
gtggcggctccatagctcaggggttagagcactg

SEQ ID NO: 41270 - DNA, 50 bp, Artificial Sequence
  Probe
gtggcggctccatagctcaggggttagagcactggtcttgtaaaccaggg

SEQ ID NO: 41271 - DNA, 34 bp, Artificial Sequence
  Probe
gtggcgggggtatagctcagtggtagagcatttg

SEQ ID NO: 41272 - DNA, 18 bp, Artificial Sequence
  Probe
gtggcgtcccggtagctc

SEQ ID NO: 41273 - DNA, 30 bp, Artificial Sequence; identical to SEQ ID NO: 22800
  Probe

SEQ ID NO: 41274 - DNA, 20 bp, Artificial Sequence
  Probe
gtggtatagtggtaagcata

SEQ ID NO: 41275 - DNA, 21 bp, Artificial Sequence
  Probe
gtggtatagtggtaagcatag

SEQ ID NO: 41276 - DNA, 23 bp, Artificial Sequence
  Probe
gtggtatagtggtaagcatagct

SEQ ID NO: 41277 - DNA, 24 bp, Artificial Sequence
  Probe
gtggtatagtggtaagcatagctg

SEQ ID NO: 41278 - DNA, 18 bp, Artificial Sequence
  Probe
gtggtatagtggtgagca

SEQ ID NO: 41279 - DNA, 20 bp, Artificial Sequence
  Probe
gtggtatagtggtgagcata

SEQ ID NO: 41280 - DNA, 21 bp, Artificial Sequence
  Probe
gtggtatagtggtgagcatag

SEQ ID NO: 41281 - DNA, 23 bp, Artificial Sequence
  Probe
gtggtatagtggtgagcatagct

SEQ ID NO: 41282 - DNA, 24 bp, Artificial Sequence
  Probe
gtggtatagtggtgagcatagctg

SEQ ID NO: 41283 - DNA, 25 bp, Artificial Sequence
  Probe
gtggtatagtggtgagcatagctgc

SEQ ID NO: 41284 - DNA, 20 bp, Artificial Sequence
  Probe
gtggtatagtggttagcata

SEQ ID NO: 41285 - DNA, 21 bp, Artificial Sequence
  Probe
gtggtatagtggttagcatag

SEQ ID NO: 41286 - DNA, 23 bp, Artificial Sequence
  Probe
gtggtatagtggttagcatagct

SEQ ID NO: 41287 - DNA, 24 bp, Artificial Sequence
  Probe
gtggtatagtggttagcatagctg

SEQ ID NO: 41288 - DNA, 27 bp, Artificial Sequence
  Probe
gtggtcatcacgttcgcctaacacgcg

SEQ ID NO: 41289 - DNA, 24 bp, Artificial Sequence
  Probe
gtggtcgttgccatgttaacgttt

SEQ ID NO: 41290 - DNA, 18 bp, Artificial Sequence
  Probe
gtggtctagtggctagga

SEQ ID NO: 41291 - DNA, 19 bp, Artificial Sequence
  Probe
gtggtctagtggctaggat

SEQ ID NO: 41292 - DNA, 20 bp, Artificial Sequence
  Probe
gtggtctagtggctaggatt

SEQ ID NO: 41293 - DNA, 22 bp, Artificial Sequence
  Probe
gtggtctagtggctaggattcg

SEQ ID NO: 41294 - DNA, 23 bp, Artificial Sequence
  Probe
gtggtctagtggctaggattcgg

SEQ ID NO: 41295 - DNA, 18 bp, Artificial Sequence
  Probe
gtggtctagtggttagga

SEQ ID NO: 41296 - DNA, 19 bp, Artificial Sequence
  Probe
gtggtctagtggttaggat

SEQ ID NO: 41297 - DNA, 20 bp, Artificial Sequence
  Probe
gtggtctagtggttaggatt

SEQ ID NO: 41298 - DNA, 21 bp, Artificial Sequence
  Probe
gtggtctagtggttaggattc

SEQ ID NO: 41299 - DNA, 22 bp, Artificial Sequence
  Probe
gtggtctagtggttaggattcg

SEQ ID NO: 41300 - DNA, 23 bp, Artificial Sequence
  Probe
gtggtctagtggttaggattcgg

SEQ ID NO: 41301 - DNA, 24 bp, Artificial Sequence
  Probe
gtggtctagtggttaggattcggc

SEQ ID NO: 41302 - DNA, 50 bp, Artificial Sequence
  Probe
gtggtgacccagtggcctaatggataaggcatcagcctccggagctgggg

SEQ ID NO: 41303 - DNA, 29 bp, Artificial Sequence
  Probe
gtggtgacttttgccctcctggaataaca

SEQ ID NO: 41304 - DNA, 36 bp, Artificial Sequence; identical to SEQ ID NO: 14097
  Probe

SEQ ID NO: 41305 - DNA, 17 bp, Artificial Sequence
  Probe
gtggttaggattcggcg

SEQ ID NO: 41306 - DNA, 36 bp, Artificial Sequence; identical to SEQ ID NO: 22856
  Probe

SEQ ID NO: 41307 - DNA, 27 bp, Artificial Sequence
  Probe
gtggttatcacgttcgcctaacacgcg

SEQ ID NO: 41308 - DNA, 23 bp, Artificial Sequence
  Probe
gtggttatcacgttcgcctcaca

SEQ ID NO: 41309 - DNA, 26 bp, Artificial Sequence
  Probe
gtggttatcacgttcgcctcacacgc

SEQ ID NO: 41310 - DNA, 27 bp, Artificial Sequence
  Probe
gtggttatcacgttcgcctcacacgcg

SEQ ID NO: 41311 - DNA, 18 bp, Artificial Sequence
  Probe
gtggttcagtggtagaat

SEQ ID NO: 41312 - DNA, 19 bp, Artificial Sequence
  Probe
gtggttcagtggtagaatt

SEQ ID NO: 41313 - DNA, 20 bp, Artificial Sequence
  Probe
gtggttcagtggtagaattc

SEQ ID NO: 41314 - DNA, 21 bp, Artificial Sequence
  Probe
gtggttcagtggtagaattct

SEQ ID NO: 41315 - DNA, 22 bp, Artificial Sequence
  Probe
gtggttcagtggtagaattctc

SEQ ID NO: 41316 - DNA, 23 bp, Artificial Sequence
  Probe
gtggttcagtggtagaattctcg

SEQ ID NO: 41317 - DNA, 24 bp, Artificial Sequence
  Probe
gtggttcagtggtagaattctcgc

SEQ ID NO: 41318 - DNA, 27 bp, Artificial Sequence
  Probe
gtggttcagtggtagaattctcgcctc

SEQ ID NO: 41319 - DNA, 28 bp, Artificial Sequence
  Probe
gtggttcagtggtagaattctcgcctcc

SEQ ID NO: 41320 - DNA, 27 bp, Artificial Sequence
  Probe
gtggttcagtggtagaattctcgcctg

SEQ ID NO: 41321 - DNA, 29 bp, Artificial Sequence
  Probe
gtggttctaacttgctggggtggcggttt

SEQ ID NO: 41322 - DNA, 27 bp, Artificial Sequence
  Probe
gtggttgtagtccgtgcgagaataatg

SEQ ID NO: 41323 - DNA, 18 bp, Artificial Sequence
  Probe
gtgtaagcagggtcgttt

SEQ ID NO: 41324 - DNA, 19 bp, Artificial Sequence
  Probe
gtgtaagcagggtcgtttt

SEQ ID NO: 41325 - DNA, 20 bp, Artificial Sequence
  Probe
gtgtaatggttagcactctg

SEQ ID NO: 41326 - DNA, 50 bp, Artificial Sequence
  Probe
gtgtcaggatggccgagtggtctaaggcgccagactcaagcttggcttcc

SEQ ID NO: 41327 - DNA, 25 bp, Artificial Sequence
  Probe
gtgtcagtttttctcttcagctttt

SEQ ID NO: 41328 - DNA, 17 bp, Artificial Sequence
  Probe
gtgtccttcgatagctc

SEQ ID NO: 41329 - DNA, 50 bp, Artificial Sequence
  Probe
gtgtccttcgatagctcagttggtagagcggaggactgtaggctcattaa

SEQ ID NO: 41330 - DNA, 34 bp, Artificial Sequence
  Probe
gtgtggtttccgtagtgtagtggttatcacgttc

SEQ ID NO: 41331 - DNA, 36 bp, Artificial Sequence; identical to SEQ ID NO: 33282
  Probe

SEQ ID NO: 41332 - DNA, 50 bp, Artificial Sequence
  Probe
gtgtggtttccgtagtgtagtggttatcacgttcgcctcacacgcgaaag

SEQ ID NO: 41333 - DNA, 18 bp, Artificial Sequence
  Probe
gtgtgtagctgcactttt

SEQ ID NO: 41334 - DNA, 19 bp, Artificial Sequence
  Probe
gtgtgtagctgcacttttt

SEQ ID NO: 41335 - DNA, 29 bp, Artificial Sequence
  Probe
gtgttgatggtatagtggtgagcatagct

SEQ ID NO: 41336 - DNA, 30 bp, Artificial Sequence
  Probe
gtgttgatggtatagtggtgagcatagctg

SEQ ID NO: 41337 - DNA, 28 bp, Artificial Sequence
  Probe
gtgtttgtgggtttaagtcccattggtc

SEQ ID NO: 41338 - DNA, 41 bp, Artificial Sequence; identical to SEQ ID NO: 7121
  Probe

SEQ ID NO: 41339 - DNA, 42 bp, Artificial Sequence; identical to SEQ ID NO: 7122
  Probe

SEQ ID NO: 41340 - DNA, 50 bp, Artificial Sequence
  Probe
gttaaatacagaccaagagccttcaaagccctcagtaagttgcaatactt

SEQ ID NO: 41341 - DNA, 43 bp, Artificial Sequence; identical to SEQ ID NO: 7129
  Probe

SEQ ID NO: 41342 - DNA, 30 bp, Artificial Sequence; identical to SEQ ID NO: 1521
  Probe

SEQ ID NO: 41343 - DNA, 37 bp, Artificial Sequence; identical to SEQ ID NO: 1523
  Probe

SEQ ID NO: 41344 - DNA, 26 bp, Artificial Sequence
  Probe
gttagtatagtggtgagtatccccgc

SEQ ID NO: 41345 - DNA, 18 bp, Artificial Sequence
  Probe
gttcaaatccgggtgccc

SEQ ID NO: 41346 - DNA, 21 bp, Artificial Sequence
  Probe
gttcaaatccgggtgccccct

SEQ ID NO: 41347 - DNA, 24 bp, Artificial Sequence
  Probe
gttcaaatccgggtgccccctcaa

SEQ ID NO: 41348 - DNA, 30 bp, Artificial Sequence
  Probe
gttcaaatcctgctcacagcgtcgccattt

SEQ ID NO: 41349 - DNA, 31 bp, Artificial Sequence
  Probe
gttcaaatcctgctcacagcgtcgccatttt

SEQ ID NO: 41350 - DNA, 20 bp, Artificial Sequence
  Probe
gttcaatccccagcacctcc

SEQ ID NO: 41351 - DNA, 21 bp, Artificial Sequence
  Probe
gttcaatccccggcacctcca

SEQ ID NO: 41352 - DNA, 21 bp, Artificial Sequence
  Probe
gttcaatcccgggtttcggca

SEQ ID NO: 41353 - DNA, 33 bp, Artificial Sequence
  Probe
gttcaatcccgggtttcggcagcgcttccgttt

SEQ ID NO: 41354 - DNA, 34 bp, Artificial Sequence
  Probe
gttcaatcccgggtttcggcagcgcttccgtttt

SEQ ID NO: 41355 - DNA, 29 bp, Artificial Sequence
  Probe
gttcaatcccgggtttcggcagttgcatt

SEQ ID NO: 41356 - DNA, 30 bp, Artificial Sequence
  Probe
gttcaatcccgggtttcggcagttgcattt

SEQ ID NO: 41357 - DNA, 31 bp, Artificial Sequence
  Probe
gttcaatcccgggtttcggcagttgcatttt

SEQ ID NO: 41358 - DNA, 50 bp, Artificial Sequence
  Probe
gttcaggtcgcagtctcccctggaggcgtgggttcgaatcccactcctga

SEQ ID NO: 41359 - DNA, 20 bp, Artificial Sequence
  Probe
gttcagtggtagaattctcg

SEQ ID NO: 41360 - DNA, 28 bp, Artificial Sequence
  Probe
gttccatagtgtagcggttatcacgtct

SEQ ID NO: 41361 - DNA, 28 bp, Artificial Sequence
  Probe
gttccatagtgtagtggttatcacgtct

SEQ ID NO: 41362 - DNA, 30 bp, Artificial Sequence; identical to SEQ ID NO: 14124
  Probe

SEQ ID NO: 41363 - DNA, 31 bp, Artificial Sequence
  Probe
gttcgaacctcagagggggcagctgccattt

SEQ ID NO: 41364 - DNA, 21 bp, Artificial Sequence
  Probe
gttcgaatcccaccgctgcca

SEQ ID NO: 41365 - DNA, 34 bp, Artificial Sequence
  Probe
gttcgaatcccaccgctgccaggtgcttcccttt

SEQ ID NO: 41366 - DNA, 29 bp, Artificial Sequence
  Probe
gttcgaatcccacttctgacacatacttt

SEQ ID NO: 41367 - DNA, 30 bp, Artificial Sequence
  Probe
gttcgaatcccacttctgacacattcgttt

SEQ ID NO: 41368 - DNA, 32 bp, Artificial Sequence
  Probe
gttcgaatccggctcgaaggagttcacaattt

SEQ ID NO: 41369 - DNA, 19 bp, Artificial Sequence
  Probe
gttcgaatcctgccgacta

SEQ ID NO: 41370 - DNA, 31 bp, Artificial Sequence
  Probe
gttcgaatcctgctcacagcgtcactagttt

SEQ ID NO: 41371 - DNA, 30 bp, Artificial Sequence
  Probe
gttcgaatcctgtcggctacggtttggttt

SEQ ID NO: 41372 - DNA, 24 bp, Artificial Sequence
  Probe
gttcgactcccagcggggccttgg

SEQ ID NO: 41373 - DNA, 21 bp, Artificial Sequence
  Probe
gttcgactcctggctggctcg

SEQ ID NO: 41374 - DNA, 33 bp, Artificial Sequence
  Probe
gttcgactcctggctggctcgcgatgtctgttt

SEQ ID NO: 41375 - DNA, 34 bp, Artificial Sequence
  Probe
gttcgactcctggctggctcgcgatgtctgtttt

SEQ ID NO: 41376 - DNA, 35 bp, Artificial Sequence
  Probe
gttcgagcccacccaggaacgcttgttcgagcttt

SEQ ID NO: 41377 - DNA, 21 bp, Artificial Sequence
  Probe
gttcgagcccacccagggacg

SEQ ID NO: 41378 - DNA, 24 bp, Artificial Sequence
  Probe
gttcgagcccacccagggacgcct

SEQ ID NO: 41379 - DNA, 35 bp, Artificial Sequence
  Probe
gttcgagcccacccagggacgcctctttgagcttt

SEQ ID NO: 41380 - DNA, 32 bp, Artificial Sequence
  Probe
gttcgagcccacccagggacgcgctctccttt

SEQ ID NO: 41381 - DNA, 34 bp, Artificial Sequence
  Probe
gttcgagcccacccagggacgcgtggtgactttt

SEQ ID NO: 41382 - DNA, 32 bp, Artificial Sequence
  Probe
gttcgagcccacccagggacgctatgaccttt

SEQ ID NO: 41383 - DNA, 33 bp, Artificial Sequence
  Probe
gttcgagcccacccagggacgctatgacctttt

SEQ ID NO: 41384 - DNA, 35 bp, Artificial Sequence
  Probe
gttcgagcccacccagggacggtcagtgcttcttt

SEQ ID NO: 41385 - DNA, 18 bp, Artificial Sequence
  Probe
gttcgagccccagtggaa

SEQ ID NO: 41386 - DNA, 20 bp, Artificial Sequence
  Probe
gttcgagccccagtggaacc

SEQ ID NO: 41387 - DNA, 24 bp, Artificial Sequence
  Probe
gttcgagtcccacctggggtgtcg

SEQ ID NO: 41388 - DNA, 33 bp, Artificial Sequence
  Probe
gttcgagtcccatctggggtggcctgtgacttt

SEQ ID NO: 41389 - DNA, 34 bp, Artificial Sequence
  Probe
gttcgagtcccatctggggtggcctgtgactttt

SEQ ID NO: 41390 - DNA, 24 bp, Artificial Sequence
  Probe
gttcgagtcccatctgggtcgcgt

SEQ ID NO: 41391 - DNA, 20 bp, Artificial Sequence
  Probe
gttcgagtcccttcgtggtc

SEQ ID NO: 41392 - DNA, 21 bp, Artificial Sequence
  Probe
gttcgagtcccttcgtggtcg

SEQ ID NO: 41393 - DNA, 24 bp, Artificial Sequence
  Probe
gttcgagtcccttcgtggtcgttg

SEQ ID NO: 41394 - DNA, 21 bp, Artificial Sequence
  Probe
gttcgagtcctgccgcggtcg

SEQ ID NO: 41395 - DNA, 24 bp, Artificial Sequence
  Probe
gttcgagtcctgccgcggtcgaag

SEQ ID NO: 41396 - DNA, 20 bp, Artificial Sequence
  Probe
gttcgatccccagcatctcc

SEQ ID NO: 41397 - DNA, 28 bp, Artificial Sequence
  Probe
gttcgatccccagcatctccagtgtttt

SEQ ID NO: 41398 - DNA, 21 bp, Artificial Sequence
  Probe
gttcgatccccggcacctcca

SEQ ID NO: 41399 - DNA, 18 bp, Artificial Sequence
  Probe
gttcgatccccggcatct

SEQ ID NO: 41400 - DNA, 21 bp, Artificial Sequence
  Probe
gttcgatccccggcatctcca

SEQ ID NO: 41401 - DNA, 24 bp, Artificial Sequence
  Probe
gttcgatccccggcatctccattg

SEQ ID NO: 41402 - DNA, 18 bp, Artificial Sequence
  Probe
gttcgatcccgggtttcg

SEQ ID NO: 41403 - DNA, 20 bp, Artificial Sequence
  Probe
gttcgatcccgggtttcggc

SEQ ID NO: 41404 - DNA, 31 bp, Artificial Sequence
  Probe
gttcgatcccgggtttcggcacttcctcttt

SEQ ID NO: 41405 - DNA, 28 bp, Artificial Sequence
  Probe
gttcgatcccgggtttcggcagaagttt

SEQ ID NO: 41406 - DNA, 28 bp, Artificial Sequence
  Probe
gttcgatcccgggtttcggcagaccttt

SEQ ID NO: 41407 - DNA, 29 bp, Artificial Sequence
  Probe
gttcgatcccgggtttcggcagctacttt

SEQ ID NO: 41408 - DNA, 30 bp, Artificial Sequence
  Probe
gttcgatcccgggtttcggcagctactttt

SEQ ID NO: 41409 - DNA, 30 bp, Artificial Sequence
  Probe
gttcgatcctcacacggggcacaataattt

SEQ ID NO: 41410 - DNA, 21 bp, Artificial Sequence
  Probe
gttcgattccccgacggggag

SEQ ID NO: 41411 - DNA, 24 bp, Artificial Sequence
  Probe
gttcgattccccgacggggaggca

SEQ ID NO: 41412 - DNA, 34 bp, Artificial Sequence
  Probe
gttcgattccccgacggggaggcagccgtgcttt

SEQ ID NO: 41413 - DNA, 19 bp, Artificial Sequence
  Probe
gttcgattcccggcccatg

SEQ ID NO: 41414 - DNA, 32 bp, Artificial Sequence
  Probe
gttcgattcccggtcaggaaagtaagccgttt

SEQ ID NO: 41415 - DNA, 29 bp, Artificial Sequence
  Probe
gttcgattcccggtcagggaatgaggttt

SEQ ID NO: 41416 - DNA, 30 bp, Artificial Sequence
  Probe
gttcgattcccggtcagggaatgaggtttt

SEQ ID NO: 41417 - DNA, 20 bp, Artificial Sequence
  Probe
gttcgattccggctcgaagg

SEQ ID NO: 41418 - DNA, 36 bp, Artificial Sequence
  Probe
gttcgattccggctcgaaggaagtgcccgatgcttt

SEQ ID NO: 41419 - DNA, 37 bp, Artificial Sequence
  Probe
gttcgattccggctcgaaggaagtgcccgatgctttt

SEQ ID NO: 41420 - DNA, 36 bp, Artificial Sequence
  Probe
gttcgattccggctcgaaggacttcgtctgtaattt

SEQ ID NO: 41421 - DNA, 37 bp, Artificial Sequence
  Probe
gttcgattccggctcgaaggacttcgtctgtaatttt

SEQ ID NO: 41422 - DNA, 36 bp, Artificial Sequence
  Probe
gttcgattccggctcgaaggagacaagtgcggtttt

SEQ ID NO: 41423 - DNA, 36 bp, Artificial Sequence
  Probe
gttcgattccggctcgaaggagctgccgtattcttt

SEQ ID NO: 41424 - DNA, 23 bp, Artificial Sequence
  Probe
gttcttgtagttgaaatacaacg

SEQ ID NO: 41425 - DNA, 50 bp, Artificial Sequence; identical to SEQ ID NO: 23018
  Probe

SEQ ID NO: 41426 - DNA, 30 bp, Artificial Sequence; identical to SEQ ID NO: 14129
  Probe

SEQ ID NO: 41427 - DNA, 34 bp, Artificial Sequence; identical to SEQ ID NO: 7208
  Probe

SEQ ID NO: 41428 - DNA, 18 bp, Artificial Sequence
  Probe
gttgccatgttaacgttt

SEQ ID NO: 41429 - DNA, 24 bp, Artificial Sequence
  Probe
gttggtctaggggtatgattctcg

SEQ ID NO: 41430 - DNA, 28 bp, Artificial Sequence
  Probe
gttggtggtatagtggtaagcatagctg

SEQ ID NO: 41431 - DNA, 28 bp, Artificial Sequence
  Probe
gttggtggtatagtggtgagcatagctg

SEQ ID NO: 41432 - DNA, 28 bp, Artificial Sequence
  Probe
gttggtggtatagtggttagcatagctg

SEQ ID NO: 41433 - DNA, 24 bp, Artificial Sequence
  Probe
gttgtagtccgtgcgagaataatg

SEQ ID NO: 41434 - DNA, 50 bp, Artificial Sequence; identical to SEQ ID NO: 1530
  Probe

SEQ ID NO: 41435 - DNA, 50 bp, Artificial Sequence; identical to SEQ ID NO: 1531
  Probe

SEQ ID NO: 41436 - DNA, 27 bp, Artificial Sequence
  Probe
gtttagacgggctcacatcaccccata

SEQ ID NO: 41437 - DNA, 34 bp, Artificial Sequence; identical to SEQ ID NO: 7239
  Probe

SEQ ID NO: 41438 - DNA, 30 bp, Artificial Sequence; identical to SEQ ID NO: 1536
  Probe

SEQ ID NO: 41439 - DNA, 33 bp, Artificial Sequence; identical to SEQ ID NO: 1537
  Probe

SEQ ID NO: 41440 - DNA, 37 bp, Artificial Sequence; identical to SEQ ID NO: 1541
  Probe

SEQ ID NO: 41441 - DNA, 29 bp, Artificial Sequence
  Probe
gtttccgtagtggagtggttatcacgttc

SEQ ID NO: 41442 - DNA, 31 bp, Artificial Sequence; identical to SEQ ID NO: 23081
  Probe

SEQ ID NO: 41443 - DNA, 21 bp, Artificial Sequence
  Probe
gtttccgtagtgtagcggtta

SEQ ID NO: 41444 - DNA, 26 bp, Artificial Sequence
  Probe
gtttccgtagtgtagcggttatcaca

SEQ ID NO: 41445 - DNA, 32 bp, Artificial Sequence; identical to SEQ ID NO: 1548
  Probe

SEQ ID NO: 41446 - DNA, 35 bp, Artificial Sequence; identical to SEQ ID NO: 1551
  Probe

SEQ ID NO: 41447 - DNA, 18 bp, Artificial Sequence
  Probe
gtttccgtagtgtagtgg

SEQ ID NO: 41448 - DNA, 19 bp, Artificial Sequence
  Probe
gtttccgtagtgtagtggt

SEQ ID NO: 41449 - DNA, 20 bp, Artificial Sequence
  Probe
gtttccgtagtgtagtggtc

SEQ ID NO: 41450 - DNA, 22 bp, Artificial Sequence
  Probe
gtttccgtagtgtagtggtcat

SEQ ID NO: 41451 - DNA, 34 bp, Artificial Sequence; identical to SEQ ID NO: 7259
  Probe

SEQ ID NO: 41452 - DNA, 35 bp, Artificial Sequence; identical to SEQ ID NO: 7260
  Probe

SEQ ID NO: 41453 - DNA, 36 bp, Artificial Sequence; identical to SEQ ID NO: 7261
  Probe

SEQ ID NO: 41454 - DNA, 50 bp, Artificial Sequence; identical to SEQ ID NO: 7263
  Probe

SEQ ID NO: 41455 - DNA, 20 bp, Artificial Sequence
  Probe
gtttccgtagtgtagtggtt

SEQ ID NO: 41456 - DNA, 21 bp, Artificial Sequence
  Probe
gtttccgtagtgtagtggtta

SEQ ID NO: 41457 - DNA, 22 bp, Artificial Sequence
  Probe
gtttccgtagtgtagtggttat

SEQ ID NO: 41458 - DNA, 23 bp, Artificial Sequence
  Probe
gtttccgtagtgtagtggttatc

SEQ ID NO: 41459 - DNA, 24 bp, Artificial Sequence
  Probe
gtttccgtagtgtagtggttatca

SEQ ID NO: 41460 - DNA, 25 bp, Artificial Sequence
  Probe
gtttccgtagtgtagtggttatcac

SEQ ID NO: 41461 - DNA, 26 bp, Artificial Sequence
  Probe
gtttccgtagtgtagtggttatcacg

SEQ ID NO: 41462 - DNA, 27 bp, Artificial Sequence
  Probe
gtttccgtagtgtagtggttatcacgt

SEQ ID NO: 41463 - DNA, 28 bp, Artificial Sequence
  Probe
gtttccgtagtgtagtggttatcacgtt

SEQ ID NO: 41464 - DNA, 29 bp, Artificial Sequence
  Probe
gtttccgtagtgtagtggttatcacgttc

SEQ ID NO: 41465 - DNA, 30 bp, Artificial Sequence; identical to SEQ ID NO: 7273
  Probe

SEQ ID NO: 41466 - DNA, 31 bp, Artificial Sequence; identical to SEQ ID NO: 7274
  Probe

SEQ ID NO: 41467 - DNA, 32 bp, Artificial Sequence; identical to SEQ ID NO: 7275
  Probe

SEQ ID NO: 41468 - DNA, 33 bp, Artificial Sequence; identical to SEQ ID NO: 7276
  Probe

SEQ ID NO: 41469 - DNA, 34 bp, Artificial Sequence; identical to SEQ ID NO: 1562
  Probe

SEQ ID NO: 41470 - DNA, 35 bp, Artificial Sequence; identical to SEQ ID NO: 23123
  Probe

SEQ ID NO: 41471 - DNA, 36 bp, Artificial Sequence; identical to SEQ ID NO: 23124
  Probe

SEQ ID NO: 41472 - DNA, 37 bp, Artificial Sequence
  Probe
gtttccgtagtgtagtggttatcacgttcgcctaaca

SEQ ID NO: 41473 - DNA, 38 bp, Artificial Sequence
  Probe
gtttccgtagtgtagtggttatcacgttcgcctaacac

SEQ ID NO: 41474 - DNA, 41 bp, Artificial Sequence; identical to SEQ ID NO: 23126
  Probe

SEQ ID NO: 41475 - DNA, 42 bp, Artificial Sequence; identical to SEQ ID NO: 33531
  Probe

SEQ ID NO: 41476 - DNA, 49 bp, Artificial Sequence; identical to SEQ ID NO: 23127
  Probe

SEQ ID NO: 41477 - DNA, 34 bp, Artificial Sequence; identical to SEQ ID NO: 7278
  Probe

SEQ ID NO: 41478 - DNA, 35 bp, Artificial Sequence; identical to SEQ ID NO: 7279
  Probe

SEQ ID NO: 41479 - DNA, 36 bp, Artificial Sequence; identical to SEQ ID NO: 7280
  Probe

SEQ ID NO: 41480 - DNA, 37 bp, Artificial Sequence; identical to SEQ ID NO: 7281
  Probe

SEQ ID NO: 41481 - DNA, 42 bp, Artificial Sequence; identical to SEQ ID NO: 23135
  Probe

SEQ ID NO: 41482 - DNA, 29 bp, Artificial Sequence
  Probe
gtttccgtagtgtagtggttatcacgttt

SEQ ID NO: 41483 - DNA, 31 bp, Artificial Sequence; identical to SEQ ID NO: 23137
  Probe

SEQ ID NO: 41484 - DNA, 29 bp, Artificial Sequence
  Probe
gtttccgtagtgtagtggttattatgttc

SEQ ID NO: 41485 - DNA, 31 bp, Artificial Sequence; identical to SEQ ID NO: 23143
  Probe

SEQ ID NO: 41486 - DNA, 28 bp, Artificial Sequence
  Probe
gtttccgtggtgtagtggttatcacatt

SEQ ID NO: 41487 - DNA, 30 bp, Artificial Sequence; identical to SEQ ID NO: 11583
  Probe

SEQ ID NO: 41488 - DNA, 31 bp, Artificial Sequence; identical to SEQ ID NO: 23150
  Probe

SEQ ID NO: 41489 - DNA, 32 bp, Artificial Sequence; identical to SEQ ID NO: 7284
  Probe

SEQ ID NO: 41490 - DNA, 33 bp, Artificial Sequence; identical to SEQ ID NO: 7285
  Probe

SEQ ID NO: 41491 - DNA, 23 bp, Artificial Sequence
  Probe
gtttgggtccgagaggtcccggg

SEQ ID NO: 41492 - DNA, 41 bp, Artificial Sequence
  Probe
gtttgggtccgagaggtcccgggttcaaatcccggacgagc

SEQ ID NO: 41493 - DNA, 50 bp, Artificial Sequence
  Probe
gtttgggtccgagaggtcccgggttcaaatcccggacgagcccctctttt

SEQ ID NO: 41494 - DNA, 17 bp, Artificial Sequence
  Probe
gtttgtgggtttaagtc

SEQ ID NO: 41495 - DNA, 18 bp, Artificial Sequence
  Probe
gtttgtgggtttaagtcc

SEQ ID NO: 41496 - DNA, 19 bp, Artificial Sequence
  Probe
gtttgtgggtttaagtccc

SEQ ID NO: 41497 - DNA, 21 bp, Artificial Sequence
  Probe
gtttgtgggtttaagtcccat

SEQ ID NO: 41498 - DNA, 22 bp, Artificial Sequence
  Probe
gtttgtgggtttaagtcccatt

SEQ ID NO: 41499 - DNA, 23 bp, Artificial Sequence
  Probe
gtttgtgggtttaagtcccattg

SEQ ID NO: 41500 - DNA, 24 bp, Artificial Sequence
  Probe
gtttgtgggtttaagtcccattgg

SEQ ID NO: 41501 - DNA, 25 bp, Artificial Sequence
  Probe
gtttgtgggtttaagtcccattggt

SEQ ID NO: 41502 - DNA, 26 bp, Artificial Sequence
  Probe
gtttgtgggtttaagtcccattggtc

SEQ ID NO: 41503 - DNA, 27 bp, Artificial Sequence
  Probe
gtttgtgggtttaagtcccattggtct

SEQ ID NO: 41504 - DNA, 28 bp, Artificial Sequence
  Probe
gtttgtgggtttaagtcccattggtcta

SEQ ID NO: 41505 - DNA, 29 bp, Artificial Sequence
  Probe
gtttgtgggtttaagtcccattggtctag

SEQ ID NO: 41506 - DNA, 30 bp, Artificial Sequence; identical to SEQ ID NO: 7300
  Probe

SEQ ID NO: 41507 - DNA, 31 bp, Artificial Sequence; identical to SEQ ID NO: 7301
  Probe

SEQ ID NO: 41508 - DNA, 32 bp, Artificial Sequence; identical to SEQ ID NO: 7302
  Probe

SEQ ID NO: 41509 - DNA, 33 bp, Artificial Sequence; identical to SEQ ID NO: 7303
  Probe

SEQ ID NO: 41510 - DNA, 34 bp, Artificial Sequence; identical to SEQ ID NO: 7304
  Probe

SEQ ID NO: 41511 - DNA, 35 bp, Artificial Sequence; identical to SEQ ID NO: 7305
  Probe

SEQ ID NO: 41512 - DNA, 39 bp, Artificial Sequence
  Probe
gttttcacccaggcggcccgggttcgactcccggtgtgg

SEQ ID NO: 41513 - DNA, 41 bp, Artificial Sequence
  Probe
gttttcacccaggcggcccgggttcgactcccggtgtggga

SEQ ID NO: 41514 - DNA, 45 bp, Artificial Sequence
  Probe
gttttcacccaggcggcccgggttcgactcccggtgtgggaacgc

SEQ ID NO: 41515 - DNA, 49 bp, Artificial Sequence
  Probe
gttttcacccaggcggcccgggttcgactcccggtgtgggaacgccgaa

SEQ ID NO: 41516 - DNA, 50 bp, Artificial Sequence
  Probe
gttttcacccaggcggcccgggttcgactcccggtgtgggaacgccgaaa

SEQ ID NO: 41517 - DNA, 50 bp, Artificial Sequence
  Probe
gttttcacccaggcggcccgggttcgactcccggtgtgggaatgactgga

SEQ ID NO: 41518 - DNA, 45 bp, Artificial Sequence
  Probe
gttttcacccaggtggcccgggttcgactcccggtatgggaacaa

SEQ ID NO: 41519 - DNA, 50 bp, Artificial Sequence
  Probe
gttttcacccaggtggcccgggttcgactcccggtatgggaacgcttcct

SEQ ID NO: 41520 - DNA, 20 bp, Artificial Sequence
  Probe
gtttttcatatcattggtcg

SEQ ID NO: 41521 - DNA, 23 bp, Artificial Sequence
  Probe
gtttttcatatcattggtcgtgg

SEQ ID NO: 41522 - DNA, 32 bp, Artificial Sequence; identical to SEQ ID NO: 25624
  Probe

SEQ ID NO: 41523 - DNA, 46 bp, Artificial Sequence; identical to SEQ ID NO: 7307
  Probe

SEQ ID NO: 41524 - DNA, 50 bp, Artificial Sequence; identical to SEQ ID NO: 7308
  Probe

SEQ ID NO: 41525 - DNA, 50 bp, Artificial Sequence; identical to SEQ ID NO: 7321
  Probe

SEQ ID NO: 41526 - DNA, 18 bp, Artificial Sequence
  Probe
taaaccaggggtcgcgag

SEQ ID NO: 41527 - DNA, 36 bp, Artificial Sequence; identical to SEQ ID NO: 7329
  Probe

SEQ ID NO: 41528 - DNA, 28 bp, Artificial Sequence
  Probe
taaacctagccccaaacccactccacct

SEQ ID NO: 41529 - DNA, 38 bp, Artificial Sequence; identical to SEQ ID NO: 7332
  Probe

SEQ ID NO: 41530 - DNA, 50 bp, Artificial Sequence; identical to SEQ ID NO: 7341
  Probe

SEQ ID NO: 41531 - DNA, 50 bp, Artificial Sequence; identical to SEQ ID NO: 1567
  Probe

SEQ ID NO: 41532 - DNA, 17 bp, Artificial Sequence
  Probe
taacacaaagcacccaa

SEQ ID NO: 41533 - DNA, 18 bp, Artificial Sequence
  Probe
taacacgcgaaaggtccc

SEQ ID NO: 41534 - DNA, 20 bp, Artificial Sequence
  Probe
taacacgcgaaaggtccccg

SEQ ID NO: 41535 - DNA, 21 bp, Artificial Sequence
  Probe
taacacgcgaaaggtccccgg

SEQ ID NO: 41536 - DNA, 22 bp, Artificial Sequence
  Probe
taacacgcgaaaggtccccggt

SEQ ID NO: 41537 - DNA, 38 bp, Artificial Sequence
  Probe
taacacgcgaaaggtccccggttcgaaaccgggcggaa

SEQ ID NO: 41538 - DNA, 30 bp, Artificial Sequence; identical to SEQ ID NO: 11605
  Probe

SEQ ID NO: 41539 - DNA, 30 bp, Artificial Sequence; identical to SEQ ID NO: 7365
  Probe

SEQ ID NO: 41540 - DNA, 33 bp, Artificial Sequence; identical to SEQ ID NO: 7368
  Probe

SEQ ID NO: 41541 - DNA, 41 bp, Artificial Sequence; identical to SEQ ID NO: 7396
  Probe

SEQ ID NO: 41542 - DNA, 31 bp, Artificial Sequence; identical to SEQ ID NO: 7406
  Probe

SEQ ID NO: 41543 - DNA, 37 bp, Artificial Sequence
  Probe
taagccgcgcattggtggttcagtggtagaattctcg

SEQ ID NO: 41544 - DNA, 28 bp, Artificial Sequence
  Probe
taagctatcgggcccataccccgaaaat

SEQ ID NO: 41545 - DNA, 50 bp, Artificial Sequence; identical to SEQ ID NO: 1573
  Probe

SEQ ID NO: 41546 - DNA, 32 bp, Artificial Sequence; identical to SEQ ID NO: 7457
  Probe

SEQ ID NO: 41547 - DNA, 17 bp, Artificial Sequence
  Probe
taatggataaggcactg

SEQ ID NO: 41548 - DNA, 18 bp, Artificial Sequence
  Probe
taatggttagcactctgg

SEQ ID NO: 41549 - DNA, 50 bp, Artificial Sequence; identical to SEQ ID NO: 1574
  Probe

SEQ ID NO: 41550 - DNA, 30 bp, Artificial Sequence; identical to SEQ ID NO: 7478
  Probe

SEQ ID NO: 41551 - DNA, 20 bp, Artificial Sequence
  Probe
tacacgcagaaggtcctggg

SEQ ID NO: 41552 - DNA, 21 bp, Artificial Sequence
  Probe
tacacgcagaaggtcctgggt

SEQ ID NO: 41553 - DNA, 43 bp, Artificial Sequence; identical to SEQ ID NO: 7483
  Probe

SEQ ID NO: 41554 - DNA, 34 bp, Artificial Sequence; identical to SEQ ID NO: 7490
  Probe

SEQ ID NO: 41555 - DNA, 41 bp, Artificial Sequence; identical to SEQ ID NO: 7497
  Probe

SEQ ID NO: 41556 - DNA, 42 bp, Artificial Sequence; identical to SEQ ID NO: 7498
  Probe

SEQ ID NO: 41557 - DNA, 27 bp, Artificial Sequence
  Probe
tacagtcagaggttcaattcctcttct

SEQ ID NO: 41558 - DNA, 28 bp, Artificial Sequence
  Probe
tacagtcagaggttcaattcctcttctt

SEQ ID NO: 41559 - DNA, 29 bp, Artificial Sequence
  Probe
tacagtcagaggttcaattcctcttctta

SEQ ID NO: 41560 - DNA, 32 bp, Artificial Sequence; identical to SEQ ID NO: 7506
  Probe

SEQ ID NO: 41561 - DNA, 32 bp, Artificial Sequence; identical to SEQ ID NO: 7512
  Probe

SEQ ID NO: 41562 - DNA, 50 bp, Artificial Sequence; identical to SEQ ID NO: 7523
  Probe

SEQ ID NO: 41563 - DNA, 31 bp, Artificial Sequence
  Probe
tactcagtggtctagtggttaggattcagcg

SEQ ID NO: 41564 - DNA, 30 bp, Artificial Sequence
  Probe
tactcgttagtatagtggtgcgtatccccg

SEQ ID NO: 41565 - DNA, 50 bp, Artificial Sequence; identical to SEQ ID NO: 7535
  Probe

SEQ ID NO: 41566 - DNA, 50 bp, Artificial Sequence; identical to SEQ ID NO: 1580
  Probe

SEQ ID NO: 41567 - DNA, 24 bp, Artificial Sequence
  Probe
tagacgggctcacatcaccccata

SEQ ID NO: 41568 - DNA, 28 bp, Artificial Sequence
  Probe
tagacgggctcacatcaccccataaaca

SEQ ID NO: 41569 - DNA, 30 bp, Artificial Sequence; identical to SEQ ID NO: 7542
  Probe

SEQ ID NO: 41570 - DNA, 31 bp, Artificial Sequence; identical to SEQ ID NO: 7543
  Probe

SEQ ID NO: 41571 - DNA, 41 bp, Artificial Sequence; identical to SEQ ID NO: 7552
  Probe

SEQ ID NO: 41572 - DNA, 45 bp, Artificial Sequence
  Probe
tagattgaagccagttgattagggtgcttagctgttaactaagtg

SEQ ID NO: 41573 - DNA, 36 bp, Artificial Sequence; identical to SEQ ID NO: 1584
  Probe

SEQ ID NO: 41574 - DNA, 37 bp, Artificial Sequence; identical to SEQ ID NO: 7559
  Probe

SEQ ID NO: 41575 - DNA, 22 bp, Artificial Sequence
  Probe
tagccccaaacccactccacct

SEQ ID NO: 41576 - DNA, 18 bp, Artificial Sequence
  Probe
tagcggttaggattcctg

SEQ ID NO: 41577 - DNA, 18 bp, Artificial Sequence
  Probe
tagcggttatcacattcg

SEQ ID NO: 41578 - DNA, 18 bp, Artificial Sequence
  Probe
tagcggttatcacgtctg

SEQ ID NO: 41579 - DNA, 23 bp, Artificial Sequence
  Probe
tagctcagtcggtagagcatgag

SEQ ID NO: 41580 - DNA, 24 bp, Artificial Sequence
  Probe
tagctcagtcggtagagcatgaga

SEQ ID NO: 41581 - DNA, 17 bp, Artificial Sequence
  Probe
tagctcagttgggagag

SEQ ID NO: 41582 - DNA, 50 bp, Artificial Sequence; identical to SEQ ID NO: 7568
  Probe

SEQ ID NO: 41583 - DNA, 34 bp, Artificial Sequence; identical to SEQ ID NO: 7578
  Probe

SEQ ID NO: 41584 - DNA, 35 bp, Artificial Sequence; identical to SEQ ID NO: 7579
  Probe

SEQ ID NO: 41585 - DNA, 22 bp, Artificial Sequence
  Probe
taggatgcgagaggtcccgggt

SEQ ID NO: 41586 - DNA, 31 bp, Artificial Sequence; identical to SEQ ID NO: 7585
  Probe

SEQ ID NO: 41587 - DNA, 32 bp, Artificial Sequence; identical to SEQ ID NO: 1593
  Probe

SEQ ID NO: 41588 - DNA, 33 bp, Artificial Sequence; identical to SEQ ID NO: 1594
  Probe

SEQ ID NO: 41589 - DNA, 34 bp, Artificial Sequence; identical to SEQ ID NO: 7586
  Probe

SEQ ID NO: 41590 - DNA, 35 bp, Artificial Sequence; identical to SEQ ID NO: 7587
  Probe

SEQ ID NO: 41591 - DNA, 36 bp, Artificial Sequence; identical to SEQ ID NO: 1595
  Probe

SEQ ID NO: 41592 - DNA, 37 bp, Artificial Sequence; identical to SEQ ID NO: 7588
  Probe

SEQ ID NO: 41593 - DNA, 38 bp, Artificial Sequence; identical to SEQ ID NO: 23494
  Probe

SEQ ID NO: 41594 - DNA, 18 bp, Artificial Sequence
  Probe
taggggtatgattctcgc

SEQ ID NO: 41595 - DNA, 18 bp, Artificial Sequence
  Probe
taggggtatgattctcgg

SEQ ID NO: 41596 - DNA, 50 bp, Artificial Sequence; identical to SEQ ID NO: 1596
  Probe

SEQ ID NO: 41597 - DNA, 29 bp, Artificial Sequence
  Probe
taggtcgctggttcgattccggctcgaag

SEQ ID NO: 41598 - DNA, 30 bp, Artificial Sequence; identical to SEQ ID NO: 11715
  Probe

SEQ ID NO: 41599 - DNA, 50 bp, Artificial Sequence
  Probe
taggtcgctggttcgattccggctcgaaggacttcgtctgtaatttttaa

SEQ ID NO: 41600 - DNA, 22 bp, Artificial Sequence
  Probe
tagtaaacaggagatcctgggt

SEQ ID NO: 41601 - DNA, 22 bp, Artificial Sequence
  Probe
tagtatagtggtgagtatcccc

SEQ ID NO: 41602 - DNA, 23 bp, Artificial Sequence
  Probe
tagtatagtggtgagtatccccg

SEQ ID NO: 41603 - DNA, 20 bp, Artificial Sequence
  Probe
tagtccgtgcgagaataatg

SEQ ID NO: 41604 - DNA, 23 bp, Artificial Sequence
  Probe
tagtctaggctgtcagctcttcc

SEQ ID NO: 41605 - DNA, 37 bp, Artificial Sequence; identical to SEQ ID NO: 14202
  Probe

SEQ ID NO: 41606 - DNA, 18 bp, Artificial Sequence
  Probe
tagtggtaagcatagctg

SEQ ID NO: 41607 - DNA, 21 bp, Artificial Sequence
  Probe
tagtggtagaattctcgcctc

SEQ ID NO: 41608 - DNA, 50 bp, Artificial Sequence
  Probe
tagtggtatcatgcaagattcccattcttgcgacccgggttcgattcccg

SEQ ID NO: 41609 - DNA, 37 bp, Artificial Sequence; identical to SEQ ID NO: 14204
  Probe

SEQ ID NO: 41610 - DNA, 42 bp, Artificial Sequence
  Probe
tagtggtcatcacgttcgcctaacacgcgaaaggtccccggt

SEQ ID NO: 41611 - DNA, 18 bp, Artificial Sequence
  Probe
tagtggtgagcatagctg

SEQ ID NO: 41612 - DNA, 23 bp, Artificial Sequence
  Probe
tagtggtgagcatagctgccttc

SEQ ID NO: 41613 - DNA, 39 bp, Artificial Sequence
  Probe
tagtggtgagcatagctgccttccaagcagttgacccgg

SEQ ID NO: 41614 - DNA, 18 bp, Artificial Sequence
  Probe
tagtggtgagtatccccg

SEQ ID NO: 41615 - DNA, 23 bp, Artificial Sequence
  Probe
tagtggtgagtatccccgcctgt

SEQ ID NO: 41616 - DNA, 24 bp, Artificial Sequence
  Probe
tagtggtgagtatccccgcctgtc

SEQ ID NO: 41617 - DNA, 25 bp, Artificial Sequence
  Probe
tagtggtgagtatccccgcctgtca

SEQ ID NO: 41618 - DNA, 38 bp, Artificial Sequence; identical to SEQ ID NO: 14213
  Probe

SEQ ID NO: 41619 - DNA, 18 bp, Artificial Sequence
  Probe
tagtggttagcatagctg

SEQ ID NO: 41620 - DNA, 34 bp, Artificial Sequence
  Probe
tagtggttaggattcggcgctctcaccgccgcgg

SEQ ID NO: 41621 - DNA, 50 bp, Artificial Sequence
  Probe
tagtggttaggattcggcgctctcaccgccgcggcccgggttcgattccc

SEQ ID NO: 41622 - DNA, 18 bp, Artificial Sequence
  Probe
tagtggttatcacatctg

SEQ ID NO: 41623 - DNA, 19 bp, Artificial Sequence
  Probe
tagtggttatcacgtctgc

SEQ ID NO: 41624 - DNA, 18 bp, Artificial Sequence
  Probe
tagtggttatcacgttcg

SEQ ID NO: 41625 - DNA, 19 bp, Artificial Sequence
  Probe
tagtggttatcacgttcgc

SEQ ID NO: 41626 - DNA, 42 bp, Artificial Sequence; identical to SEQ ID NO: 23563
  Probe

SEQ ID NO: 41627 - DNA, 25 bp, Artificial Sequence
  Probe
tagtggttatcacgttcgcctcaca

SEQ ID NO: 41628 - DNA, 29 bp, Artificial Sequence
  Probe
tagtggttatcacgttcgcctcacacgcg

SEQ ID NO: 41629 - DNA, 50 bp, Artificial Sequence
  Probe
tagtggttatcacgttcgcctcacacgcgaaaggtccccggttcgaaacc

SEQ ID NO: 41630 - DNA, 18 bp, Artificial Sequence
  Probe
tagtggttatcatgttcg

SEQ ID NO: 41631 - DNA, 23 bp, Artificial Sequence
  Probe
tagtggttatcatgttcgcctca

SEQ ID NO: 41632 - DNA, 22 bp, Artificial Sequence
  Probe
tagtgtagtggttatcacgttc

SEQ ID NO: 41633 - DNA, 24 bp, Artificial Sequence
  Probe
tagtgtagtggttatcacgttcgc

SEQ ID NO: 41634 - DNA, 17 bp, Artificial Sequence
  Probe
tatacccacacccaccc

SEQ ID NO: 41635 - DNA, 18 bp, Artificial Sequence
  Probe
tatacccacacccaccca

SEQ ID NO: 41636 - DNA, 20 bp, Artificial Sequence
  Probe
tatacccacacccacccaag

SEQ ID NO: 41637 - DNA, 21 bp, Artificial Sequence
  Probe
tatacccacacccacccaaga

SEQ ID NO: 41638 - DNA, 22 bp, Artificial Sequence
  Probe
tatacccacacccacccaagaa

SEQ ID NO: 41639 - DNA, 24 bp, Artificial Sequence
  Probe
tatacccacacccacccaagaaca

SEQ ID NO: 41640 - DNA, 29 bp, Artificial Sequence
  Probe
tatacccacacccacccaagaacagggtt

SEQ ID NO: 41641 - DNA, 30 bp, Artificial Sequence; identical to SEQ ID NO: 7623
  Probe

SEQ ID NO: 41642 - DNA, 31 bp, Artificial Sequence; identical to SEQ ID NO: 7624
  Probe

SEQ ID NO: 41643 - DNA, 32 bp, Artificial Sequence; identical to SEQ ID NO: 7625
  Probe

SEQ ID NO: 41644 - DNA, 33 bp, Artificial Sequence; identical to SEQ ID NO: 7626
  Probe

SEQ ID NO: 41645 - DNA, 34 bp, Artificial Sequence; identical to SEQ ID NO: 7627
  Probe

SEQ ID NO: 41646 - DNA, 35 bp, Artificial Sequence; identical to SEQ ID NO: 7628
  Probe

SEQ ID NO: 41647 - DNA, 36 bp, Artificial Sequence; identical to SEQ ID NO: 7629
  Probe

SEQ ID NO: 41648 - DNA, 37 bp, Artificial Sequence; identical to SEQ ID NO: 7630
  Probe

SEQ ID NO: 41649 - DNA, 38 bp, Artificial Sequence; identical to SEQ ID NO: 23596
  Probe

SEQ ID NO: 41650 - DNA, 39 bp, Artificial Sequence; identical to SEQ ID NO: 7631
  Probe

SEQ ID NO: 41651 - DNA, 20 bp, Artificial Sequence
  Probe
tatagtggtaagcatagctg

SEQ ID NO: 41652 - DNA, 20 bp, Artificial Sequence
  Probe
tatagtggtgagcatagctg

SEQ ID NO: 41653 - DNA, 19 bp, Artificial Sequence
  Probe
tatagtggtgagtatcccc

SEQ ID NO: 41654 - DNA, 20 bp, Artificial Sequence
  Probe
tatagtggtgagtatccccg

SEQ ID NO: 41655 - DNA, 21 bp, Artificial Sequence
  Probe
tatagtggtgagtgtccccgt

SEQ ID NO: 41656 - DNA, 19 bp, Artificial Sequence
  Probe
tatagtggttagtactctg

SEQ ID NO: 41657 - DNA, 21 bp, Artificial Sequence
  Probe
tatagtggttagtactctgcg

SEQ ID NO: 41658 - DNA, 27 bp, Artificial Sequence
  Probe
tatcattggtcgtggttgtagtccgtg

SEQ ID NO: 41659 - DNA, 31 bp, Artificial Sequence; identical to SEQ ID NO: 23604
  Probe

SEQ ID NO: 41660 - DNA, 50 bp, Artificial Sequence
  Probe
tatccccgcctgtcacgcgggagaccggggttcgattccccgacggggag

SEQ ID NO: 41661 - DNA, 34 bp, Artificial Sequence
  Probe
tatgaggccccgggttcaatccccggcatctcca

SEQ ID NO: 41662 - DNA, 37 bp, Artificial Sequence; identical to SEQ ID NO: 23608
  Probe

SEQ ID NO: 41663 - DNA, 34 bp, Artificial Sequence
  Probe
tatgaggccccgggttcgatccccggcatctcca

SEQ ID NO: 41664 - DNA, 37 bp, Artificial Sequence; identical to SEQ ID NO: 23610
  Probe

SEQ ID NO: 41665 - DNA, 34 bp, Artificial Sequence
  Probe
tatgaggtcccgggttcgatccccggcatctcca

SEQ ID NO: 41666 - DNA, 37 bp, Artificial Sequence
  Probe
tatgaggtcccgggttcgatccccggcatctccaagt

SEQ ID NO: 41667 - DNA, 24 bp, Artificial Sequence
  Probe
tatggtctagcggttaggattcct

SEQ ID NO: 41668 - DNA, 27 bp, Artificial Sequence
  Probe
tcaaactttaaatgggcaagaagccca

SEQ ID NO: 41669 - DNA, 28 bp, Artificial Sequence
  Probe
tcaaactttaaatgggcaagaagcccag

SEQ ID NO: 41670 - DNA, 29 bp, Artificial Sequence
  Probe
tcaaactttaaatgggcaagaagcccagc

SEQ ID NO: 41671 - DNA, 30 bp, Artificial Sequence
  Probe
tcaaactttaaatgggcaagaagcccagct

SEQ ID NO: 41672 - DNA, 32 bp, Artificial Sequence; identical to SEQ ID NO: 7643
  Probe

SEQ ID NO: 41673 - DNA, 35 bp, Artificial Sequence; identical to SEQ ID NO: 23625
  Probe

SEQ ID NO: 41674 - DNA, 22 bp, Artificial Sequence
  Probe
tcaaatcccggacgagccccct

SEQ ID NO: 41675 - DNA, 22 bp, Artificial Sequence
  Probe
tcaaatccgggtgccccctcaa

SEQ ID NO: 41676 - DNA, 26 bp, Artificial Sequence
  Probe
tcaacttaacttgaccgctctgagct

SEQ ID NO: 41677 - DNA, 45 bp, Artificial Sequence
  Probe
tcaagcagttaacgcgggttcgattcccgggtaacgaaacgtttt

SEQ ID NO: 41678 - DNA, 22 bp, Artificial Sequence
  Probe
tcaagtccctgttcgggcggca

SEQ ID NO: 41679 - DNA, 24 bp, Artificial Sequence
  Probe
tcaatccccaatacctccaggttt

SEQ ID NO: 41680 - DNA, 25 bp, Artificial Sequence
  Probe
tcaatccccaatacctccaggtttt

SEQ ID NO: 41681 - DNA, 22 bp, Artificial Sequence
  Probe
tcaatccccagcacctccacaa

SEQ ID NO: 41682 - DNA, 29 bp, Artificial Sequence
  Probe
tcaatccccggcacctccagcttcatttt

SEQ ID NO: 41683 - DNA, 26 bp, Artificial Sequence
  Probe
tcaatccccggcacctccattccttt

SEQ ID NO: 41684 - DNA, 22 bp, Artificial Sequence
  Probe
tcaattccccgacggggaggtg

SEQ ID NO: 41685 - DNA, 22 bp, Artificial Sequence
  Probe
tcaattcccggtcagggaacca

SEQ ID NO: 41686 - DNA, 22 bp, Artificial Sequence
  Probe
tcacaagaactgctaactcatg

SEQ ID NO: 41687 - DNA, 49 bp, Artificial Sequence; identical to SEQ ID NO: 1609
  Probe

SEQ ID NO: 41688 - DNA, 38 bp, Artificial Sequence
  Probe
tcacacgcgaaaggtccccggttcgaaaccgggcggaa

SEQ ID NO: 41689 - DNA, 38 bp, Artificial Sequence
  Probe
tcacacgcgaaaggtccccggttcgatcccgggcggaa

SEQ ID NO: 41690 - DNA, 21 bp, Artificial Sequence
  Probe
tcacacggggcacaataattt

SEQ ID NO: 41691 - DNA, 18 bp, Artificial Sequence
  Probe
tcacatcaccccataaac

SEQ ID NO: 41692 - DNA, 19 bp, Artificial Sequence
  Probe
tcacatcaccccataaaca

SEQ ID NO: 41693 - DNA, 22 bp, Artificial Sequence
  Probe
tcacatcaccccataaacaaat

SEQ ID NO: 41694 - DNA, 35 bp, Artificial Sequence
  Probe
tcacccaggcggcccgggttcgactcccggtgtgg

SEQ ID NO: 41695 - DNA, 36 bp, Artificial Sequence; identical to SEQ ID NO: 34263
  Probe

SEQ ID NO: 41696 - DNA, 37 bp, Artificial Sequence
  Probe
tcacccaggcggcccgggttcgactcccggtgtggga

SEQ ID NO: 41697 - DNA, 38 bp, Artificial Sequence
  Probe
tcacccaggcggcccgggttcgactcccggtgtgggaa

SEQ ID NO: 41698 - DNA, 41 bp, Artificial Sequence; identical to SEQ ID NO: 7674
  Probe

SEQ ID NO: 41699 - DNA, 37 bp, Artificial Sequence
  Probe
tcacccaggtggcccgggttcgactcccggtatggga

SEQ ID NO: 41700 - DNA, 41 bp, Artificial Sequence; identical to SEQ ID NO: 7677
  Probe

SEQ ID NO: 41701 - DNA, 36 bp, Artificial Sequence; identical to SEQ ID NO: 25709
  Probe

SEQ ID NO: 41702 - DNA, 41 bp, Artificial Sequence; identical to SEQ ID NO: 7682
  Probe

SEQ ID NO: 41703 - DNA, 21 bp, Artificial Sequence
  Probe
tcacctggagcaagacccttt

SEQ ID NO: 41704 - DNA, 31 bp, Artificial Sequence
  Probe
tcacgcgggagaccggggttcaattccccga

SEQ ID NO: 41705 - DNA, 41 bp, Artificial Sequence; identical to SEQ ID NO: 7691
  Probe

SEQ ID NO: 41706 - DNA, 30 bp, Artificial Sequence
  Probe
tcacgcgggagaccggggttcgattcccca

SEQ ID NO: 41707 - DNA, 31 bp, Artificial Sequence
  Probe
tcacgcgggagaccggggttcgattccccaa

SEQ ID NO: 41708 - DNA, 36 bp, Artificial Sequence
  Probe
tcacgcgggagaccggggttcgattccccaacgggg

SEQ ID NO: 41709 - DNA, 30 bp, Artificial Sequence; identical to SEQ ID NO: 34283
  Probe

SEQ ID NO: 41710 - DNA, 31 bp, Artificial Sequence; identical to SEQ ID NO: 7697
  Probe

SEQ ID NO: 41711 - DNA, 33 bp, Artificial Sequence; identical to SEQ ID NO: 1619
  Probe

SEQ ID NO: 41712 - DNA, 41 bp, Artificial Sequence; identical to SEQ ID NO: 7701
  Probe

SEQ ID NO: 41713 - DNA, 49 bp, Artificial Sequence; identical to SEQ ID NO: 7704
  Probe

SEQ ID NO: 41714 - DNA, 50 bp, Artificial Sequence; identical to SEQ ID NO: 7705
  Probe

SEQ ID NO: 41715 - DNA, 41 bp, Artificial Sequence; identical to SEQ ID NO: 7707
  Probe

SEQ ID NO: 41716 - DNA, 41 bp, Artificial Sequence; identical to SEQ ID NO: 7709
  Probe

SEQ ID NO: 41717 - DNA, 50 bp, Artificial Sequence
  Probe
tcacgcgggagaccggggttcgattccccgacggggagagtactagcagt

SEQ ID NO: 41718 - DNA, 50 bp, Artificial Sequence
  Probe
tcacgcgggagaccggggttcgattccccgacggggaggaggcttaaact

SEQ ID NO: 41719 - DNA, 41 bp, Artificial Sequence; identical to SEQ ID NO: 7716
  Probe

SEQ ID NO: 41720 - DNA, 50 bp, Artificial Sequence; identical to SEQ ID NO: 7720
  Probe

SEQ ID NO: 41721 - DNA, 50 bp, Artificial Sequence
  Probe
tcacgcgggagaccggggttcgattccccgacggggaggcagccgtgctt

SEQ ID NO: 41722 - DNA, 41 bp, Artificial Sequence; identical to SEQ ID NO: 7723
  Probe

SEQ ID NO: 41723 - DNA, 49 bp, Artificial Sequence
  Probe
tcacgcgggagaccggggttcgattccccgacggggaggccaagtacgt

SEQ ID NO: 41724 - DNA, 50 bp, Artificial Sequence
  Probe
tcacgcgggagaccggggttcgattccccgacggggaggccaagtacgtt

SEQ ID NO: 41725 - DNA, 50 bp, Artificial Sequence
  Probe
tcacgcgggagaccggggttcgattccccgacggggaggccgggtacttt

SEQ ID NO: 41726 - DNA, 18 bp, Artificial Sequence
  Probe
tcagaagattctaggttc

SEQ ID NO: 41727 - DNA, 31 bp, Artificial Sequence
  Probe
tcagaagattgagggttcgagtcccttcgtg

SEQ ID NO: 41728 - DNA, 33 bp, Artificial Sequence; identical to SEQ ID NO: 23699
  Probe

SEQ ID NO: 41729 - DNA, 35 bp, Artificial Sequence
  Probe
tcagaagattgagggttcgagtcccttcgtggtcg

SEQ ID NO: 41730 - DNA, 34 bp, Artificial Sequence
  Probe
tcagaaggttgcgtgttcaagtcacgtcggggtc

SEQ ID NO: 41731 - DNA, 18 bp, Artificial Sequence
  Probe
tcagctatagggtggaga

SEQ ID NO: 41732 - DNA, 30 bp, Artificial Sequence
  Probe
tcagggatgggttcgattctcatagtccta

SEQ ID NO: 41733 - DNA, 17 bp, Artificial Sequence
  Probe
tcagtggtagaattctc

SEQ ID NO: 41734 - DNA, 18 bp, Artificial Sequence
  Probe
tcagtggtagaattctcg

SEQ ID NO: 41735 - DNA, 21 bp, Artificial Sequence
  Probe
tcataatctgaaggtcctgag

SEQ ID NO: 41736 - DNA, 21 bp, Artificial Sequence
  Probe
tcataatctgaaggtcgtgag

SEQ ID NO: 41737 - DNA, 50 bp, Artificial Sequence; identical to SEQ ID NO: 7753
  Probe

SEQ ID NO: 41738 - DNA, 30 bp, Artificial Sequence; identical to SEQ ID NO: 7761
  Probe

SEQ ID NO: 41739 - DNA, 31 bp, Artificial Sequence; identical to SEQ ID NO: 7762
  Probe

SEQ ID NO: 41740 - DNA, 32 bp, Artificial Sequence; identical to SEQ ID NO: 7763
  Probe

SEQ ID NO: 41741 - DNA, 33 bp, Artificial Sequence; identical to SEQ ID NO: 7764
  Probe

SEQ ID NO: 41742 - DNA, 34 bp, Artificial Sequence; identical to SEQ ID NO: 7765
  Probe

SEQ ID NO: 41743 - DNA, 35 bp, Artificial Sequence; identical to SEQ ID NO: 7766
  Probe

SEQ ID NO: 41744 - DNA, 36 bp, Artificial Sequence; identical to SEQ ID NO: 7767
  Probe

SEQ ID NO: 41745 - DNA, 37 bp, Artificial Sequence; identical to SEQ ID NO: 7768
  Probe

SEQ ID NO: 41746 - DNA, 37 bp, Artificial Sequence
  Probe
tccaagcagttgacccgggttcgattcccggccaacg

SEQ ID NO: 41747 - DNA, 42 bp, Artificial Sequence; identical to SEQ ID NO: 23758
  Probe

SEQ ID NO: 41748 - DNA, 34 bp, Artificial Sequence
  Probe
tccaagtgatggtttccctctggcagttctcaag

SEQ ID NO: 41749 - DNA, 23 bp, Artificial Sequence
  Probe
tccaatgggggttccccgcgcag

SEQ ID NO: 41750 - DNA, 25 bp, Artificial Sequence
  Probe
tccaatgggggttccccgcgcaggt

SEQ ID NO: 41751 - DNA, 20 bp, Artificial Sequence
  Probe
tccaatggggtctccccgcg

SEQ ID NO: 41752 - DNA, 22 bp, Artificial Sequence
  Probe
tccaatggggtctccccgcgca

SEQ ID NO: 41753 - DNA, 23 bp, Artificial Sequence
  Probe
tccaatggggtctccccgcgcag

SEQ ID NO: 41754 - DNA, 25 bp, Artificial Sequence
  Probe
tccaatggggtctccccgcgcaggt

SEQ ID NO: 41755 - DNA, 24 bp, Artificial Sequence
  Probe
tccaatggggtttccccgcacagg

SEQ ID NO: 41756 - DNA, 25 bp, Artificial Sequence
  Probe
tccaatggggtttccccgcacaggt

SEQ ID NO: 41757 - DNA, 41 bp, Artificial Sequence; identical to SEQ ID NO: 7777
  Probe

SEQ ID NO: 41758 - DNA, 32 bp, Artificial Sequence
  Probe
tccagcaatccgagttcgaatctcggtgggac

SEQ ID NO: 41759 - DNA, 32 bp, Artificial Sequence; identical to SEQ ID NO: 7779
  Probe

SEQ ID NO: 41760 - DNA, 33 bp, Artificial Sequence; identical to SEQ ID NO: 7780
  Probe

SEQ ID NO: 41761 - DNA, 34 bp, Artificial Sequence; identical to SEQ ID NO: 1627
  Probe

SEQ ID NO: 41762 - DNA, 37 bp, Artificial Sequence; identical to SEQ ID NO: 7781
  Probe

SEQ ID NO: 41763 - DNA, 31 bp, Artificial Sequence; identical to SEQ ID NO: 23790
  Probe

SEQ ID NO: 41764 - DNA, 34 bp, Artificial Sequence; identical to SEQ ID NO: 1628
  Probe

SEQ ID NO: 41765 - DNA, 37 bp, Artificial Sequence; identical to SEQ ID NO: 7783
  Probe

SEQ ID NO: 41766 - DNA, 24 bp, Artificial Sequence
  Probe
tccagcgatccgagttcaagtctc

SEQ ID NO: 41767 - DNA, 32 bp, Artificial Sequence
  Probe
tccagcgatccgagttcaagtctcggtggaac

SEQ ID NO: 41768 - DNA, 33 bp, Artificial Sequence
  Probe
tccagcgatccgagttcaagtctcggtggaacc

SEQ ID NO: 41769 - DNA, 24 bp, Artificial Sequence
  Probe
tccagtctcttcgggggcgtgggt

SEQ ID NO: 41770 - DNA, 27 bp, Artificial Sequence
  Probe
tccatagtgtagtggttatcacgtctg

SEQ ID NO: 41771 - DNA, 28 bp, Artificial Sequence
  Probe
tccatagtgtagtggttatcacgtctgc

SEQ ID NO: 41772 - DNA, 26 bp, Artificial Sequence
  Probe
tccatggtgtaatggttagcactctg

SEQ ID NO: 41773 - DNA, 22 bp, Artificial Sequence
  Probe
tccattggggtctccccgcgca

SEQ ID NO: 41774 - DNA, 23 bp, Artificial Sequence
  Probe
tccattggggtctccccgcgcag

SEQ ID NO: 41775 - DNA, 24 bp, Artificial Sequence
  Probe
tccattggggtctccccgcgcagg

SEQ ID NO: 41776 - DNA, 25 bp, Artificial Sequence
  Probe
tccattggggtctccccgcgcaggt

SEQ ID NO: 41777 - DNA, 21 bp, Artificial Sequence
  Probe
tccattggggtttccccgcgc

SEQ ID NO: 41778 - DNA, 22 bp, Artificial Sequence
  Probe
tccattgtgctttgcacgcgtg

SEQ ID NO: 41779 - DNA, 37 bp, Artificial Sequence; identical to SEQ ID NO: 1650
  Probe

SEQ ID NO: 41780 - DNA, 41 bp, Artificial Sequence; identical to SEQ ID NO: 7796
  Probe

SEQ ID NO: 41781 - DNA, 45 bp, Artificial Sequence
  Probe
tcccacatggtctagcggttaggattcctggttttcacccaggcg

SEQ ID NO: 41782 - DNA, 49 bp, Artificial Sequence; identical to SEQ ID NO: 7797
  Probe

SEQ ID NO: 41783 - DNA, 32 bp, Artificial Sequence; identical to SEQ ID NO: 1661
  Probe

SEQ ID NO: 41784 - DNA, 38 bp, Artificial Sequence
  Probe
tcccatatggtctagcggttaggattcctggttttcac

SEQ ID NO: 41785 - DNA, 49 bp, Artificial Sequence; identical to SEQ ID NO: 23834
  Probe

SEQ ID NO: 41786 - DNA, 50 bp, Artificial Sequence; identical to SEQ ID NO: 7809
  Probe

SEQ ID NO: 41787 - DNA, 19 bp, Artificial Sequence
  Probe
tccccggcacctccaccag

SEQ ID NO: 41788 - DNA, 20 bp, Artificial Sequence
  Probe
tccccggcacctccaccagt

SEQ ID NO: 41789 - DNA, 28 bp, Artificial Sequence
  Probe
tccccttggtctagtggttaggattcaa

SEQ ID NO: 41790 - DNA, 17 bp, Artificial Sequence
  Probe
tcccgccttttttcccg

SEQ ID NO: 41791 - DNA, 18 bp, Artificial Sequence
  Probe
tcccgccttttttcccgg

SEQ ID NO: 41792 - DNA, 23 bp, Artificial Sequence
  Probe
tcccgccttttttcccggcggcg

SEQ ID NO: 41793 - DNA, 25 bp, Artificial Sequence
  Probe
tcccgccttttttcccggcggcggg

SEQ ID NO: 41794 - DNA, 26 bp, Artificial Sequence
  Probe
tcccgccttttttcccggcggcggga

SEQ ID NO: 41795 - DNA, 27 bp, Artificial Sequence
  Probe
tcccgccttttttcccggcggcgggag

SEQ ID NO: 41796 - DNA, 28 bp, Artificial Sequence
  Probe
tcccgccttttttcccggcggcgggaga

SEQ ID NO: 41797 - DNA, 31 bp, Artificial Sequence; identical to SEQ ID NO: 7830
  Probe

SEQ ID NO: 41798 - DNA, 32 bp, Artificial Sequence; identical to SEQ ID NO: 7831
  Probe

SEQ ID NO: 41799 - DNA, 33 bp, Artificial Sequence; identical to SEQ ID NO: 7832
  Probe

SEQ ID NO: 41800 - DNA, 30 bp, Artificial Sequence; identical to SEQ ID NO: 7835
  Probe

SEQ ID NO: 41801 - DNA, 30 bp, Artificial Sequence
  Probe
tcccgggttcgatccccagcatctccagtg

SEQ ID NO: 41802 - DNA, 34 bp, Artificial Sequence
  Probe
tcccgggttcgatccccagcatctccagtgtttt

SEQ ID NO: 41803 - DNA, 20 bp, Artificial Sequence
  Probe
tccctctggcagttctcaag

SEQ ID NO: 41804 - DNA, 25 bp, Artificial Sequence
  Probe
tccctggtctagtggttaggattta

SEQ ID NO: 41805 - DNA, 26 bp, Artificial Sequence
  Probe
tccctggtctagtggttaggatttat

SEQ ID NO: 41806 - DNA, 28 bp, Artificial Sequence
  Probe
tccctggtctagtggttaggatttatta

SEQ ID NO: 41807 - DNA, 28 bp, Artificial Sequence
  Probe
tccctggtggtctaatggttaggagtcg

SEQ ID NO: 41808 - DNA, 29 bp, Artificial Sequence
  Probe
tccctggtggtctaatggttaggagtcgg

SEQ ID NO: 41809 - DNA, 18 bp, Artificial Sequence
  Probe
tccctggtggtctagtgg

SEQ ID NO: 41810 - DNA, 20 bp, Artificial Sequence
  Probe
tccctggtggtctagtggct

SEQ ID NO: 41811 - DNA, 22 bp, Artificial Sequence
  Probe
tccctggtggtctagtggctag

SEQ ID NO: 41812 - DNA, 23 bp, Artificial Sequence
  Probe
tccctggtggtctagtggctagg

SEQ ID NO: 41813 - DNA, 24 bp, Artificial Sequence
  Probe
tccctggtggtctagtggctagga

SEQ ID NO: 41814 - DNA, 25 bp, Artificial Sequence
  Probe
tccctggtggtctagtggctaggat

SEQ ID NO: 41815 - DNA, 26 bp, Artificial Sequence
  Probe
tccctggtggtctagtggctaggatt

SEQ ID NO: 41816 - DNA, 27 bp, Artificial Sequence
  Probe
tccctggtggtctagtggctaggattc

SEQ ID NO: 41817 - DNA, 28 bp, Artificial Sequence
  Probe
tccctggtggtctagtggctaggattcg

SEQ ID NO: 41818 - DNA, 29 bp, Artificial Sequence
  Probe
tccctggtggtctagtggctaggattcgg

SEQ ID NO: 41819 - DNA, 30 bp, Artificial Sequence; identical to SEQ ID NO: 7856
  Probe

SEQ ID NO: 41820 - DNA, 37 bp, Artificial Sequence; identical to SEQ ID NO: 1677
  Probe

SEQ ID NO: 41821 - DNA, 38 bp, Artificial Sequence; identical to SEQ ID NO: 23913
  Probe

SEQ ID NO: 41822 - DNA, 39 bp, Artificial Sequence; identical to SEQ ID NO: 7857
  Probe

SEQ ID NO: 41823 - DNA, 44 bp, Artificial Sequence
  Probe
tccctggtggtctagtggctaggattcggcgctttcaccgccgc

SEQ ID NO: 41824 - DNA, 45 bp, Artificial Sequence
  Probe
tccctggtggtctagtggctaggattcggcgctttcaccgccgcg

SEQ ID NO: 41825 - DNA, 19 bp, Artificial Sequence
  Probe
tccctggtggtctagtggt

SEQ ID NO: 41826 - DNA, 20 bp, Artificial Sequence
  Probe
tccctggtggtctagtggtt

SEQ ID NO: 41827 - DNA, 21 bp, Artificial Sequence
  Probe
tccctggtggtctagtggtta

SEQ ID NO: 41828 - DNA, 22 bp, Artificial Sequence
  Probe
tccctggtggtctagtggttag

SEQ ID NO: 41829 - DNA, 23 bp, Artificial Sequence
  Probe
tccctggtggtctagtggttagg

SEQ ID NO: 41830 - DNA, 24 bp, Artificial Sequence
  Probe
tccctggtggtctagtggttagga

SEQ ID NO: 41831 - DNA, 25 bp, Artificial Sequence
  Probe
tccctggtggtctagtggttaggat

SEQ ID NO: 41832 - DNA, 26 bp, Artificial Sequence
  Probe
tccctggtggtctagtggttaggatt

SEQ ID NO: 41833 - DNA, 27 bp, Artificial Sequence
  Probe
tccctggtggtctagtggttaggattc

SEQ ID NO: 41834 - DNA, 28 bp, Artificial Sequence
  Probe
tccctggtggtctagtggttaggattcg

SEQ ID NO: 41835 - DNA, 29 bp, Artificial Sequence
  Probe
tccctggtggtctagtggttaggattcgg

SEQ ID NO: 41836 - DNA, 30 bp, Artificial Sequence; identical to SEQ ID NO: 7870
  Probe

SEQ ID NO: 41837 - DNA, 38 bp, Artificial Sequence; identical to SEQ ID NO: 1686
  Probe

SEQ ID NO: 41838 - DNA, 41 bp, Artificial Sequence; identical to SEQ ID NO: 7871
  Probe

SEQ ID NO: 41839 - DNA, 42 bp, Artificial Sequence; identical to SEQ ID NO: 1689
  Probe

SEQ ID NO: 41840 - DNA, 43 bp, Artificial Sequence; identical to SEQ ID NO: 7872
  Probe

SEQ ID NO: 41841 - DNA, 45 bp, Artificial Sequence; identical to SEQ ID NO: 7874
  Probe

SEQ ID NO: 41842 - DNA, 31 bp, Artificial Sequence; identical to SEQ ID NO: 23935
  Probe

SEQ ID NO: 41843 - DNA, 35 bp, Artificial Sequence
  Probe
tccgagaggtcccgggttcaaatcccggacgagcc

SEQ ID NO: 41844 - DNA, 26 bp, Artificial Sequence
  Probe
tccgtagtgtagcggttatcacattc

SEQ ID NO: 41845 - DNA, 26 bp, Artificial Sequence
  Probe
tccgtagtgtagtggtcatcacgttc

SEQ ID NO: 41846 - DNA, 28 bp, Artificial Sequence
  Probe
tccgtagtgtagtggtcatcacgttcgc

SEQ ID NO: 41847 - DNA, 20 bp, Artificial Sequence
  Probe
tccgtagtgtagtggttatc

SEQ ID NO: 41848 - DNA, 25 bp, Artificial Sequence
  Probe
tccgtagtgtagtggttatcacgtt

SEQ ID NO: 41849 - DNA, 26 bp, Artificial Sequence
  Probe
tccgtagtgtagtggttatcacgttc

SEQ ID NO: 41850 - DNA, 27 bp, Artificial Sequence
  Probe
tccgtagtgtagtggttatcacgttcg

SEQ ID NO: 41851 - DNA, 28 bp, Artificial Sequence
  Probe
tccgtagtgtagtggttatcacgttcgc

SEQ ID NO: 41852 - DNA, 29 bp, Artificial Sequence
  Probe
tccgtagtgtagtggttatcacgttcgcc

SEQ ID NO: 41853 - DNA, 30 bp, Artificial Sequence; identical to SEQ ID NO: 7893
  Probe

SEQ ID NO: 41854 - DNA, 50 bp, Artificial Sequence; identical to SEQ ID NO: 23965
  Probe

SEQ ID NO: 41855 - DNA, 50 bp, Artificial Sequence; identical to SEQ ID NO: 7899
  Probe

SEQ ID NO: 41856 - DNA, 28 bp, Artificial Sequence
  Probe
tccgtggtggtctagtggctaggattcg

SEQ ID NO: 41857 - DNA, 29 bp, Artificial Sequence
  Probe
tccgtggtggtctagtggctaggattcgg

SEQ ID NO: 41858 - DNA, 31 bp, Artificial Sequence
  Probe
tccgtggtggtctagtggctaggattcggcg

SEQ ID NO: 41859 - DNA, 22 bp, Artificial Sequence
  Probe
tcctaagccagggattgtgggt

SEQ ID NO: 41860 - DNA, 50 bp, Artificial Sequence; identical to SEQ ID NO: 1694
  Probe

SEQ ID NO: 41861 - DNA, 24 bp, Artificial Sequence
  Probe
tcctcacacggggcacaataattt

SEQ ID NO: 41862 - DNA, 29 bp, Artificial Sequence
  Probe
tcctcatcagtatagtggtgagtatcccc

SEQ ID NO: 41863 - DNA, 30 bp, Artificial Sequence
  Probe
tcctcatcagtatagtggtgagtatccccg

SEQ ID NO: 41864 - DNA, 31 bp, Artificial Sequence
  Probe
tcctcatcagtatagtggtgagtatccccgc

SEQ ID NO: 41865 - DNA, 23 bp, Artificial Sequence
  Probe
tcctcgcagcttcgctgcgtgag

SEQ ID NO: 41866 - DNA, 18 bp, Artificial Sequence
  Probe
tcctcgctggggcctcct

SEQ ID NO: 41867 - DNA, 18 bp, Artificial Sequence
  Probe
tcctcgttagtatagtgg

SEQ ID NO: 41868 - DNA, 20 bp, Artificial Sequence
  Probe
tcctcgttagtatagtggtg

SEQ ID NO: 41869 - DNA, 21 bp, Artificial Sequence
  Probe
tcctcgttagtatagtggtga

SEQ ID NO: 41870 - DNA, 24 bp, Artificial Sequence
  Probe
tcctcgttagtatagtggtgagta

SEQ ID NO: 41871 - DNA, 37 bp, Artificial Sequence; identical to SEQ ID NO: 1708
  Probe

SEQ ID NO: 41872 - DNA, 41 bp, Artificial Sequence; identical to SEQ ID NO: 7923
  Probe

SEQ ID NO: 41873 - DNA, 29 bp, Artificial Sequence
  Probe
tcctcgttagtatagtggtgagtgtcccc

SEQ ID NO: 41874 - DNA, 30 bp, Artificial Sequence
  Probe
tcctcgttagtatagtggtgagtgtccccg

SEQ ID NO: 41875 - DNA, 27 bp, Artificial Sequence
  Probe
tcctcgttagtatagtggttagtatcc

SEQ ID NO: 41876 - DNA, 35 bp, Artificial Sequence; identical to SEQ ID NO: 1717
  Probe

SEQ ID NO: 41877 - DNA, 30 bp, Artificial Sequence
  Probe
tcctcgttagtatggtggtgagtatccctg

SEQ ID NO: 41878 - DNA, 26 bp, Artificial Sequence
  Probe
tcctggctggctcgcgatgtctgttt

SEQ ID NO: 41879 - DNA, 27 bp, Artificial Sequence
  Probe
tcctggctggctcgcgatgtctgtttt

SEQ ID NO: 41880 - DNA, 30 bp, Artificial Sequence
  Probe
tcctggctggctcgcttgtgctctcacttt

SEQ ID NO: 41881 - DNA, 31 bp, Artificial Sequence
  Probe
tcctggctggctcgcttgtgctctcactttt

SEQ ID NO: 41882 - DNA, 33 bp, Artificial Sequence; identical to SEQ ID NO: 24011
  Probe

SEQ ID NO: 41883 - DNA, 32 bp, Artificial Sequence; identical to SEQ ID NO: 24014
  Probe

SEQ ID NO: 41884 - DNA, 33 bp, Artificial Sequence; identical to SEQ ID NO: 24015
  Probe

SEQ ID NO: 41885 - DNA, 28 bp, Artificial Sequence
  Probe
tccttggtggtctagtggctaggattcg

SEQ ID NO: 41886 - DNA, 29 bp, Artificial Sequence
  Probe
tccttggtggtctagtggctaggattcgg

SEQ ID NO: 41887 - DNA, 31 bp, Artificial Sequence
  Probe
tccttggtggtctagtggctaggattcggtg

SEQ ID NO: 41888 - DNA, 29 bp, Artificial Sequence
  Probe
tcgaaaccatcctctgctatcggagtttt

SEQ ID NO: 41889 - DNA, 30 bp, Artificial Sequence
  Probe
tcgaaaccatcctctgctatcggagttttt

SEQ ID NO: 41890 - DNA, 22 bp, Artificial Sequence
  Probe
tcgaaaccgggcggaaacacct

SEQ ID NO: 41891 - DNA, 29 bp, Artificial Sequence
  Probe
tcgaaatccaatggggtctccccgcgcag

SEQ ID NO: 41892 - DNA, 29 bp, Artificial Sequence
  Probe
tcgaaatccaatggggtttccccgcacag

SEQ ID NO: 41893 - DNA, 29 bp, Artificial Sequence
  Probe
tcgaacctcagagggggcagctgccattt

SEQ ID NO: 41894 - DNA, 35 bp, Artificial Sequence; identical to SEQ ID NO: 7941
  Probe

SEQ ID NO: 41895 - DNA, 30 bp, Artificial Sequence
  Probe
tcgaatcccaccactgccagtggtacgttt

SEQ ID NO: 41896 - DNA, 22 bp, Artificial Sequence
  Probe
tcgaatcccaccgctgccacac

SEQ ID NO: 41897 - DNA, 31 bp, Artificial Sequence
  Probe
tcgaatcccaccgctgccaggctggagtttt

SEQ ID NO: 41898 - DNA, 34 bp, Artificial Sequence
  Probe
tcgaatcccaccgctgccagggttgctgtctttt

SEQ ID NO: 41899 - DNA, 32 bp, Artificial Sequence
  Probe
tcgaatcccaccgctgccaggtgcttcccttt

SEQ ID NO: 41900 - DNA, 30 bp, Artificial Sequence
  Probe
tcgaatcccactcctgacagttcgtacttt

SEQ ID NO: 41901 - DNA, 22 bp, Artificial Sequence
  Probe
tcgaatcccacttctgacacaa

SEQ ID NO: 41902 - DNA, 27 bp, Artificial Sequence
  Probe
tcgaatcccacttctgacacatacttt

SEQ ID NO: 41903 - DNA, 28 bp, Artificial Sequence
  Probe
tcgaatcccacttctgacacattcgttt

SEQ ID NO: 41904 - DNA, 22 bp, Artificial Sequence
  Probe
tcgaatcccagcggtgcctccg

SEQ ID NO: 41905 - DNA, 29 bp, Artificial Sequence
  Probe
tcgaatcctgctcacagcgtcactagttt

SEQ ID NO: 41906 - DNA, 38 bp, Artificial Sequence; identical to SEQ ID NO: 24034
  Probe

SEQ ID NO: 41907 - DNA, 22 bp, Artificial Sequence
  Probe
tcgactcccggtatgggaacaa

SEQ ID NO: 41908 - DNA, 22 bp, Artificial Sequence
  Probe
tcgactcccggtgtgggaacgc

SEQ ID NO: 41909 - DNA, 30 bp, Artificial Sequence; identical to SEQ ID NO: 11965
  Probe

SEQ ID NO: 41910 - DNA, 22 bp, Artificial Sequence
  Probe
tcgagcccacccagggacgcct

SEQ ID NO: 41911 - DNA, 30 bp, Artificial Sequence
  Probe
tcgagcccacccagggacgcgctctccttt

SEQ ID NO: 41912 - DNA, 18 bp, Artificial Sequence
  Probe
tcgagccccagtggaacc

SEQ ID NO: 41913 - DNA, 22 bp, Artificial Sequence
  Probe
tcgagtcccacctggggtgtcg

SEQ ID NO: 41914 - DNA, 31 bp, Artificial Sequence
  Probe
tcgagtcccatctggggtggcctgtgacttt

SEQ ID NO: 41915 - DNA, 22 bp, Artificial Sequence
  Probe
tcgagtcccatctgggtcgcgt

SEQ ID NO: 41916 - DNA, 18 bp, Artificial Sequence
  Probe
tcgagtcccttcgtggtc

SEQ ID NO: 41917 - DNA, 22 bp, Artificial Sequence
  Probe
tcgagtcccttcgtggtcgttg

SEQ ID NO: 41918 - DNA, 36 bp, Artificial Sequence
  Probe
tcgatccccagcacttccacaagtacatttccttat

SEQ ID NO: 41919 - DNA, 18 bp, Artificial Sequence
  Probe
tcgatccccagcatctcc

SEQ ID NO: 41920 - DNA, 25 bp, Artificial Sequence
  Probe
tcgatccccagcatctccagtgttt

SEQ ID NO: 41921 - DNA, 26 bp, Artificial Sequence
  Probe
tcgatccccagcatctccagtgtttt

SEQ ID NO: 41922 - DNA, 22 bp, Artificial Sequence
  Probe
tcgatccccagtacctccaggc

SEQ ID NO: 41923 - DNA, 22 bp, Artificial Sequence
  Probe
tcgatccccgacacctccaagt

SEQ ID NO: 41924 - DNA, 18 bp, Artificial Sequence
  Probe
tcgatccccggcacctcc

SEQ ID NO: 41925 - DNA, 19 bp, Artificial Sequence
  Probe
tcgatccccggcatctcca

SEQ ID NO: 41926 - DNA, 28 bp, Artificial Sequence
  Probe
tcgatccccggcatctccagtgtagttt

SEQ ID NO: 41927 - DNA, 29 bp, Artificial Sequence
  Probe
tcgatccccggcatctccagtgtagtttt

SEQ ID NO: 41928 - DNA, 22 bp, Artificial Sequence
  Probe
tcgatccccggcatctccattg

SEQ ID NO: 41929 - DNA, 22 bp, Artificial Sequence
  Probe
tcgatccccgtacgggccacga

SEQ ID NO: 41930 - DNA, 22 bp, Artificial Sequence
  Probe
tcgatcctcacacggggcacaa

SEQ ID NO: 41931 - DNA, 28 bp, Artificial Sequence
  Probe
tcgatcctcacacggggcacaataattt

SEQ ID NO: 41932 - DNA, 22 bp, Artificial Sequence
  Probe
tcgattccccgacggggaggca

SEQ ID NO: 41933 - DNA, 22 bp, Artificial Sequence
  Probe
tcgattcccggccaacgcaagt

SEQ ID NO: 41934 - DNA, 22 bp, Artificial Sequence
  Probe
tcgattcccggccaacgcagtg

SEQ ID NO: 41935 - DNA, 22 bp, Artificial Sequence
  Probe
tcgattcccggccaatgcacga

SEQ ID NO: 41936 - DNA, 31 bp, Artificial Sequence
  Probe
tcgattcccggccaatgcacgagtacagttt

SEQ ID NO: 41937 - DNA, 32 bp, Artificial Sequence
  Probe
tcgattcccggccaatgcacgagtacagtttt

SEQ ID NO: 41938 - DNA, 22 bp, Artificial Sequence
  Probe
tcgattcccggccaatgcagca

SEQ ID NO: 41939 - DNA, 22 bp, Artificial Sequence
  Probe
tcgattcccggcccatgcagca

SEQ ID NO: 41940 - DNA, 22 bp, Artificial Sequence
  Probe
tcgattcccggtcagggaacaa

SEQ ID NO: 41941 - DNA, 22 bp, Artificial Sequence
  Probe
tcgattcccggtcatggaacca

SEQ ID NO: 41942 - DNA, 22 bp, Artificial Sequence
  Probe
tcgattcctggtcagggaacca

SEQ ID NO: 41943 - DNA, 23 bp, Artificial Sequence
  Probe
tcgcagtctcccctggaggcgtg

SEQ ID NO: 41944 - DNA, 24 bp, Artificial Sequence
  Probe
tcgcagtctcccctggaggcgtgg

SEQ ID NO: 41945 - DNA, 26 bp, Artificial Sequence
  Probe
tcgcagtctcccctggaggcgtgggt

SEQ ID NO: 41946 - DNA, 42 bp, Artificial Sequence
  Probe
tcgcagtctcccctggaggcgtgggttcgaatcccactcctg

SEQ ID NO: 41947 - DNA, 43 bp, Artificial Sequence
  Probe
tcgcagtctcccctggaggcgtgggttcgaatcccactcctga

SEQ ID NO: 41948 - DNA, 42 bp, Artificial Sequence
  Probe
tcgcagtctcccctggaggcgtgggttcgaatcccacttctg

SEQ ID NO: 41949 - DNA, 50 bp, Artificial Sequence; identical to SEQ ID NO: 7991
  Probe

SEQ ID NO: 41950 - DNA, 23 bp, Artificial Sequence
  Probe
tcgggtgcgagaggtcccgggtt

SEQ ID NO: 41951 - DNA, 21 bp, Artificial Sequence
  Probe
tcgtaaacaggagatcctggg

SEQ ID NO: 41952 - DNA, 22 bp, Artificial Sequence
  Probe
tcgtaaacaggagatcctgggt

SEQ ID NO: 41953 - DNA, 22 bp, Artificial Sequence
  Probe
tcgtaaaccgaagatcacgggt

SEQ ID NO: 41954 - DNA, 18 bp, Artificial Sequence
  Probe
tcgtatagtggttagtac

SEQ ID NO: 41955 - DNA, 22 bp, Artificial Sequence
  Probe
tcgtatagtggttagtactctg

SEQ ID NO: 41956 - DNA, 23 bp, Artificial Sequence
  Probe
tcgtatagtggttagtactctgc

SEQ ID NO: 41957 - DNA, 22 bp, Artificial Sequence
  Probe
tcgtggttgtagtccgtgcgag

SEQ ID NO: 41958 - DNA, 29 bp, Artificial Sequence
  Probe
tcgtggttgtagtccgtgcgagaataatg

SEQ ID NO: 41959 - DNA, 27 bp, Artificial Sequence
  Probe
tcgttagtatagtggtgagtatccccg

SEQ ID NO: 41960 - DNA, 28 bp, Artificial Sequence
  Probe
tcgttagtatagtggtgagtatccccgc

SEQ ID NO: 41961 - DNA, 30 bp, Artificial Sequence; identical to SEQ ID NO: 24115
  Probe

SEQ ID NO: 41962 - DNA, 33 bp, Artificial Sequence
  Probe
tctaaaggtccctggttcgatcccgggtttcgg

SEQ ID NO: 41963 - DNA, 20 bp, Artificial Sequence
  Probe
tctaacaacatggctttctc

SEQ ID NO: 41964 - DNA, 18 bp, Artificial Sequence
  Probe
tctaggggtatgattctc

SEQ ID NO: 41965 - DNA, 19 bp, Artificial Sequence
  Probe
tctaggggtatgattctcg

SEQ ID NO: 41966 - DNA, 20 bp, Artificial Sequence
  Probe
tctaggggtatgattctcgc

SEQ ID NO: 41967 - DNA, 23 bp, Artificial Sequence
  Probe
tctagtaaacaggagatcctggg

SEQ ID NO: 41968 - DNA, 24 bp, Artificial Sequence
  Probe
tctagtaaacaggagatcctgggt

SEQ ID NO: 41969 - DNA, 46 bp, Artificial Sequence
  Probe
tctagtaaacaggagatcctgggttcgactcccagcggggccttgg

SEQ ID NO: 41970 - DNA, 18 bp, Artificial Sequence
  Probe
tctagtggctaggattcg

SEQ ID NO: 41971 - DNA, 18 bp, Artificial Sequence
  Probe
tctagtggttaggattcg

SEQ ID NO: 41972 - DNA, 19 bp, Artificial Sequence
  Probe
tctagtggttaggattcgg

SEQ ID NO: 41973 - DNA, 21 bp, Artificial Sequence
  Probe
tctagtggttaggattcggcg

SEQ ID NO: 41974 - DNA, 38 bp, Artificial Sequence
  Probe
tctcaccgccgcggcccgggttcgattcccggtcaggg

SEQ ID NO: 41975 - DNA, 43 bp, Artificial Sequence; identical to SEQ ID NO: 8000
  Probe

SEQ ID NO: 41976 - DNA, 18 bp, Artificial Sequence
  Probe
tctcataatctgaaggtc

SEQ ID NO: 41977 - DNA, 19 bp, Artificial Sequence
  Probe
tctcataatctgaaggtcc

SEQ ID NO: 41978 - DNA, 20 bp, Artificial Sequence
  Probe
tctcataatctgaaggtcct

SEQ ID NO: 41979 - DNA, 21 bp, Artificial Sequence
  Probe
tctcataatctgaaggtcctg

SEQ ID NO: 41980 - DNA, 22 bp, Artificial Sequence
  Probe
tctcataatctgaaggtcctga

SEQ ID NO: 41981 - DNA, 23 bp, Artificial Sequence
  Probe
tctcataatctgaaggtcctgag

SEQ ID NO: 41982 - DNA, 24 bp, Artificial Sequence
  Probe
tctcataatctgaaggtcctgagt

SEQ ID NO: 41983 - DNA, 41 bp, Artificial Sequence
  Probe
tctcataatctgaaggtcctgagttcgaacctcagaggggg

SEQ ID NO: 41984 - DNA, 46 bp, Artificial Sequence
  Probe
tctcataatctgaaggtcctgagttcgaacctcagagggggcaagg

SEQ ID NO: 41985 - DNA, 46 bp, Artificial Sequence
  Probe
tctcataatctgaaggtcctgagttcgaacctcagagggggcagct

SEQ ID NO: 41986 - DNA, 50 bp, Artificial Sequence
  Probe
tctcataatctgaaggtcctgagttcgaacctcagagggggcagctgcca

SEQ ID NO: 41987 - DNA, 46 bp, Artificial Sequence
  Probe
tctcataatctgaaggtcctgagttcgagcctcagagagggcagct

SEQ ID NO: 41988 - DNA, 20 bp, Artificial Sequence
  Probe
tctcataatctgaaggtcgt

SEQ ID NO: 41989 - DNA, 50 bp, Artificial Sequence
  Probe
tctcataatctgaaggtcgtgagttcgagcctcacacggggcagtctaac

SEQ ID NO: 41990 - DNA, 46 bp, Artificial Sequence
  Probe
tctcataatctgaaggtcgtgagttcgatcctcacacggggcacaa

SEQ ID NO: 41991 - DNA, 50 bp, Artificial Sequence
  Probe
tctcataatctgaaggtcgtgagttcgatcctcacacggggcacaataat

SEQ ID NO: 41992 - DNA, 32 bp, Artificial Sequence
  Probe
tctcccacatggtctagcggttaggattcctg

SEQ ID NO: 41993 - DNA, 31 bp, Artificial Sequence
  Probe
tctccctggtggtctagtggttaggattcgg

SEQ ID NO: 41994 - DNA, 23 bp, Artificial Sequence
  Probe
tctcgtaaacaggagatcctggg

SEQ ID NO: 41995 - DNA, 46 bp, Artificial Sequence
  Probe
tctcgtaaacaggagatcctgggttcgaatcccagcggggccttag

SEQ ID NO: 41996 - DNA, 38 bp, Artificial Sequence; identical to SEQ ID NO: 8005
  Probe

SEQ ID NO: 41997 - DNA, 37 bp, Artificial Sequence; identical to SEQ ID NO: 8010
  Probe

SEQ ID NO: 41998 - DNA, 33 bp, Artificial Sequence
  Probe
tctgagggtccagggttcaagtccctgttcagg

SEQ ID NO: 41999 - DNA, 32 bp, Artificial Sequence
  Probe
tctgagggtccagggttcaagtccctgttcgg

SEQ ID NO: 42000 - DNA, 34 bp, Artificial Sequence
  Probe
tctgagggtccagggttcaagtccctgttcgggc

SEQ ID NO: 42001 - DNA, 35 bp, Artificial Sequence; identical to SEQ ID NO: 34835
  Probe

SEQ ID NO: 42002 - DNA, 38 bp, Artificial Sequence; identical to SEQ ID NO: 24149
  Probe

SEQ ID NO: 42003 - DNA, 39 bp, Artificial Sequence
  Probe
tctgtcacgcgggagaccggggttcgattccccgacggg

SEQ ID NO: 42004 - DNA, 41 bp, Artificial Sequence
  Probe
tctgtcacgcgggagaccggggttcgattccccgacgggga

SEQ ID NO: 42005 - DNA, 42 bp, Artificial Sequence
  Probe
tctgtcacgcgggagaccggggttcgattccccgacggggag

SEQ ID NO: 42006 - DNA, 45 bp, Artificial Sequence
  Probe
tctgtcacgcgggagaccggggttcgattccccgacggggagacg

SEQ ID NO: 42007 - DNA, 50 bp, Artificial Sequence
  Probe
tctgtcacgcgggagaccggggttcgattccccgacggggagacgaagca

SEQ ID NO: 42008 - DNA, 25 bp, Artificial Sequence
  Probe
tctgtgctccggagttacctcgttt

SEQ ID NO: 42009 - DNA, 19 bp, Artificial Sequence
  Probe
tcttaatcccagggtcgtg

SEQ ID NO: 42010 - DNA, 19 bp, Artificial Sequence
  Probe
tcttaatctcagggtcgtg

SEQ ID NO: 42011 - DNA, 20 bp, Artificial Sequence
  Probe
tcttaatctcagggtcgtgg

SEQ ID NO: 42012 - DNA, 30 bp, Artificial Sequence; identical to SEQ ID NO: 12041
  Probe

SEQ ID NO: 42013 - DNA, 31 bp, Artificial Sequence; identical to SEQ ID NO: 34856
  Probe

SEQ ID NO: 42014 - DNA, 34 bp, Artificial Sequence; identical to SEQ ID NO: 24160
  Probe

SEQ ID NO: 42015 - DNA, 37 bp, Artificial Sequence; identical to SEQ ID NO: 8017
  Probe

SEQ ID NO: 42016 - DNA, 23 bp, Artificial Sequence
  Probe
tcttgtaaacaggagatcctggg

SEQ ID NO: 42017 - DNA, 21 bp, Artificial Sequence
  Probe
tcttgtaaaccaggggtcgcg

SEQ ID NO: 42018 - DNA, 46 bp, Artificial Sequence
  Probe
tcttgtaaaccaggggtcgcgagttcaattctcgctggggcctgtg

SEQ ID NO: 42019 - DNA, 36 bp, Artificial Sequence; identical to SEQ ID NO: 1740
  Probe

SEQ ID NO: 42020 - DNA, 38 bp, Artificial Sequence; identical to SEQ ID NO: 1742
  Probe

SEQ ID NO: 42021 - DNA, 41 bp, Artificial Sequence; identical to SEQ ID NO: 8044
  Probe

SEQ ID NO: 42022 - DNA, 46 bp, Artificial Sequence; identical to SEQ ID NO: 8048
  Probe

SEQ ID NO: 42023 - DNA, 35 bp, Artificial Sequence; identical to SEQ ID NO: 8059
  Probe

SEQ ID NO: 42024 - DNA, 20 bp, Artificial Sequence
  Probe
tgagatgttacctagcgttt

SEQ ID NO: 42025 - DNA, 32 bp, Artificial Sequence
  Probe
tgaggccccgggttcgatccccggcatctcca

SEQ ID NO: 42026 - DNA, 35 bp, Artificial Sequence; identical to SEQ ID NO: 24211
  Probe

SEQ ID NO: 42027 - DNA, 23 bp, Artificial Sequence
  Probe
tgaggtcccgggttcgatcccca

SEQ ID NO: 42028 - DNA, 50 bp, Artificial Sequence
  Probe
tgagtatccccgcctgtcacgcgggagaccggggttcgattccccgacgg

SEQ ID NO: 42029 - DNA, 44 bp, Artificial Sequence; identical to SEQ ID NO: 8071
  Probe

SEQ ID NO: 42030 - DNA, 21 bp, Artificial Sequence
  Probe
tgatcgtatagtggttagtac

SEQ ID NO: 42031 - DNA, 22 bp, Artificial Sequence
  Probe
tgatcgtatagtggttagtact

SEQ ID NO: 42032 - DNA, 25 bp, Artificial Sequence
  Probe
tgatcgtatagtggttagtactctg

SEQ ID NO: 42033 - DNA, 29 bp, Artificial Sequence
  Probe
tgattctcgcttcgggtgcgagaggtccc

SEQ ID NO: 42034 - DNA, 29 bp, Artificial Sequence
  Probe
tgattctcgctttgggtgcgagaggtccc

SEQ ID NO: 42035 - DNA, 23 bp, Artificial Sequence
  Probe
tgatttctgtaccttacacattt

SEQ ID NO: 42036 - DNA, 39 bp, Artificial Sequence; identical to SEQ ID NO: 24241
  Probe

SEQ ID NO: 42037 - DNA, 39 bp, Artificial Sequence; identical to SEQ ID NO: 24242
  Probe

SEQ ID NO: 42038 - DNA, 35 bp, Artificial Sequence
  Probe
tgcacgaggtcctgggttcgatccccagtacctcc

SEQ ID NO: 42039 - DNA, 36 bp, Artificial Sequence
  Probe
tgcacgaggtcctgggttcgatccccagtacctcca

SEQ ID NO: 42040 - DNA, 27 bp, Artificial Sequence
  Probe
tgcatgaggtcccgggttcgatcccca

SEQ ID NO: 42041 - DNA, 39 bp, Artificial Sequence; identical to SEQ ID NO: 8088
  Probe

SEQ ID NO: 42042 - DNA, 30 bp, Artificial Sequence; identical to SEQ ID NO: 12069
  Probe

SEQ ID NO: 42043 - DNA, 19 bp, Artificial Sequence
  Probe
tgccacgcgggaggcccgg

SEQ ID NO: 42044 - DNA, 21 bp, Artificial Sequence
  Probe
tgccacgcgggaggcccgggt

SEQ ID NO: 42045 - DNA, 37 bp, Artificial Sequence; identical to SEQ ID NO: 24252
  Probe

SEQ ID NO: 42046 - DNA, 38 bp, Artificial Sequence
  Probe
tgccacgcgggaggcccgggttcgattcccggccaatg

SEQ ID NO: 42047 - DNA, 39 bp, Artificial Sequence
  Probe
tgccacgcgggaggcccgggttcgattcccggccaatgc

SEQ ID NO: 42048 - DNA, 50 bp, Artificial Sequence
  Probe
tgccacgcgggaggcccgggttcgattcccggccaatgcaacgatgacgt

SEQ ID NO: 42049 - DNA, 50 bp, Artificial Sequence
  Probe
tgccacgcgggaggcccgggttcgattcccggccaatgcacgagtacagt

SEQ ID NO: 42050 - DNA, 25 bp, Artificial Sequence
  Probe
tgcccccatgtctaacaacatggct

SEQ ID NO: 42051 - DNA, 26 bp, Artificial Sequence
  Probe
tgcccccatgtctaacaacatggctt

SEQ ID NO: 42052 - DNA, 27 bp, Artificial Sequence
  Probe
tgcccccatgtctaacaacatggcttt

SEQ ID NO: 42053 - DNA, 28 bp, Artificial Sequence
  Probe
tgcccccatgtctaacaacatggctttc

SEQ ID NO: 42054 - DNA, 29 bp, Artificial Sequence
  Probe
tgcccccatgtctaacaacatggctttct

SEQ ID NO: 42055 - DNA, 30 bp, Artificial Sequence; identical to SEQ ID NO: 8103
  Probe

SEQ ID NO: 42056 - DNA, 31 bp, Artificial Sequence; identical to SEQ ID NO: 8104
  Probe

SEQ ID NO: 42057 - DNA, 32 bp, Artificial Sequence; identical to SEQ ID NO: 8105
  Probe

SEQ ID NO: 42058 - DNA, 33 bp, Artificial Sequence; identical to SEQ ID NO: 8106
  Probe

SEQ ID NO: 42059 - DNA, 34 bp, Artificial Sequence; identical to SEQ ID NO: 8107
  Probe

SEQ ID NO: 42060 - DNA, 35 bp, Artificial Sequence; identical to SEQ ID NO: 24277
  Probe

SEQ ID NO: 42061 - DNA, 32 bp, Artificial Sequence
  Probe
tgccccctctgtgctccggagttacctcgttt

SEQ ID NO: 42062 - DNA, 29 bp, Artificial Sequence
  Probe
tgcccctcatttacataaatattatacta

SEQ ID NO: 42063 - DNA, 21 bp, Artificial Sequence
  Probe
tgccgtgatcgtatagtggtt

SEQ ID NO: 42064 - DNA, 24 bp, Artificial Sequence
  Probe
tgccgtgatcgtatagtggttagt

SEQ ID NO: 42065 - DNA, 26 bp, Artificial Sequence
  Probe
tgccgtgatcgtatagtggttagtac

SEQ ID NO: 42066 - DNA, 27 bp, Artificial Sequence
  Probe
tgccgtgatcgtatagtggttagtact

SEQ ID NO: 42067 - DNA, 28 bp, Artificial Sequence
  Probe
tgccgtgatcgtatagtggttagtactc

SEQ ID NO: 42068 - DNA, 29 bp, Artificial Sequence
  Probe
tgccgtgatcgtatagtggttagtactct

SEQ ID NO: 42069 - DNA, 30 bp, Artificial Sequence; identical to SEQ ID NO: 12089
  Probe

SEQ ID NO: 42070 - DNA, 31 bp, Artificial Sequence; identical to SEQ ID NO: 8115
  Probe

SEQ ID NO: 42071 - DNA, 32 bp, Artificial Sequence; identical to SEQ ID NO: 8116
  Probe

SEQ ID NO: 42072 - DNA, 35 bp, Artificial Sequence; identical to SEQ ID NO: 1755
  Probe

SEQ ID NO: 42073 - DNA, 36 bp, Artificial Sequence; identical to SEQ ID NO: 1756
  Probe

SEQ ID NO: 42074 - DNA, 50 bp, Artificial Sequence; identical to SEQ ID NO: 35021
  Probe

SEQ ID NO: 42075 - DNA, 30 bp, Artificial Sequence; identical to SEQ ID NO: 24306
  Probe

SEQ ID NO: 42076 - DNA, 39 bp, Artificial Sequence; identical to SEQ ID NO: 8121
  Probe

SEQ ID NO: 42077 - DNA, 44 bp, Artificial Sequence; identical to SEQ ID NO: 8134
  Probe

SEQ ID NO: 42078 - DNA, 50 bp, Artificial Sequence
  Probe
tgctaataacgccaaggtcgcgggttcgatccccgtactggccacgtatt

SEQ ID NO: 42079 - DNA, 36 bp, Artificial Sequence; identical to SEQ ID NO: 8139
  Probe

SEQ ID NO: 42080 - DNA, 38 bp, Artificial Sequence; identical to SEQ ID NO: 8140
  Probe

SEQ ID NO: 42081 - DNA, 41 bp, Artificial Sequence; identical to SEQ ID NO: 8143
  Probe

SEQ ID NO: 42082 - DNA, 43 bp, Artificial Sequence; identical to SEQ ID NO: 8145
  Probe

SEQ ID NO: 42083 - DNA, 27 bp, Artificial Sequence
  Probe
tggaaccacggcgtgattcataccttt

SEQ ID NO: 42084 - DNA, 43 bp, Artificial Sequence; identical to SEQ ID NO: 24340
  Probe

SEQ ID NO: 42085 - DNA, 28 bp, Artificial Sequence
  Probe
tggatgccatagtggggcccttcactta

SEQ ID NO: 42086 - DNA, 29 bp, Artificial Sequence
  Probe
tggatgccatagtggggcccttcacttac

SEQ ID NO: 42087 - DNA, 34 bp, Artificial Sequence; identical to SEQ ID NO: 24351
  Probe

SEQ ID NO: 42088 - DNA, 27 bp, Artificial Sequence
  Probe
tgggaacaatggcacggcaaggggctc

SEQ ID NO: 42089 - DNA, 29 bp, Artificial Sequence
  Probe
tggggttcctcgcagcttcgctgcgtgag

SEQ ID NO: 42090 - DNA, 20 bp, Artificial Sequence
  Probe
tggtatagtggtaagcatag

SEQ ID NO: 42091 - DNA, 22 bp, Artificial Sequence
  Probe
tggtatagtggtaagcatagct

SEQ ID NO: 42092 - DNA, 23 bp, Artificial Sequence
  Probe
tggtatagtggtaagcatagctg

SEQ ID NO: 42093 - DNA, 20 bp, Artificial Sequence
  Probe
tggtatagtggtgagcatag

SEQ ID NO: 42094 - DNA, 22 bp, Artificial Sequence
  Probe
tggtatagtggtgagcatagct

SEQ ID NO: 42095 - DNA, 23 bp, Artificial Sequence
  Probe
tggtatagtggtgagcatagctg

SEQ ID NO: 42096 - DNA, 20 bp, Artificial Sequence
  Probe
tggtatagtggttagcatag

SEQ ID NO: 42097 - DNA, 22 bp, Artificial Sequence
  Probe
tggtatagtggttagcatagct

SEQ ID NO: 42098 - DNA, 23 bp, Artificial Sequence
  Probe
tggtatagtggttagcatagctg

SEQ ID NO: 42099 - DNA, 30 bp, Artificial Sequence; identical to SEQ ID NO: 24388
  Probe

SEQ ID NO: 42100 - DNA, 50 bp, Artificial Sequence; identical to SEQ ID NO: 1773
  Probe

SEQ ID NO: 42101 - DNA, 34 bp, Artificial Sequence; identical to SEQ ID NO: 24395
  Probe

SEQ ID NO: 42102 - DNA, 20 bp, Artificial Sequence
  Probe
tggtctagcggttaggattc

SEQ ID NO: 42103 - DNA, 21 bp, Artificial Sequence
  Probe
tggtctagcggttaggattcc

SEQ ID NO: 42104 - DNA, 21 bp, Artificial Sequence
  Probe
tggtctagtggctaggattcg

SEQ ID NO: 42105 - DNA, 22 bp, Artificial Sequence
  Probe
tggtctagtggctaggattcgg

SEQ ID NO: 42106 - DNA, 18 bp, Artificial Sequence
  Probe
tggtctagtggttaggat

SEQ ID NO: 42107 - DNA, 21 bp, Artificial Sequence
  Probe
tggtctagtggttaggattcg

SEQ ID NO: 42108 - DNA, 22 bp, Artificial Sequence
  Probe
tggtctagtggttaggattcgg

SEQ ID NO: 42109 - DNA, 30 bp, Artificial Sequence; identical to SEQ ID NO: 14406
  Probe

SEQ ID NO: 42110 - DNA, 42 bp, Artificial Sequence; identical to SEQ ID NO: 24412
  Probe

SEQ ID NO: 42111 - DNA, 34 bp, Artificial Sequence; identical to SEQ ID NO: 14407
  Probe

SEQ ID NO: 42112 - DNA, 21 bp, Artificial Sequence
  Probe
tggtgagtatccccgcctgtc

SEQ ID NO: 42113 - DNA, 23 bp, Artificial Sequence
  Probe
tggtgagtatccccgcctgtcac

SEQ ID NO: 42114 - DNA, 34 bp, Artificial Sequence; identical to SEQ ID NO: 14414
  Probe

SEQ ID NO: 42115 - DNA, 35 bp, Artificial Sequence; identical to SEQ ID NO: 14415
  Probe

SEQ ID NO: 42116 - DNA, 24 bp, Artificial Sequence
  Probe
tggtggtctagtggttaggattcg

SEQ ID NO: 42117 - DNA, 25 bp, Artificial Sequence
  Probe
tggtggtctagtggttaggattcgg

SEQ ID NO: 42118 - DNA, 20 bp, Artificial Sequence
  Probe
tggtgtagtggtatcatgca

SEQ ID NO: 42119 - DNA, 23 bp, Artificial Sequence
  Probe
tggtgtagtggtatcatgcaaga

SEQ ID NO: 42120 - DNA, 34 bp, Artificial Sequence; identical to SEQ ID NO: 14427
  Probe

SEQ ID NO: 42121 - DNA, 18 bp, Artificial Sequence
  Probe
tggttcagtggtagaatt

SEQ ID NO: 42122 - DNA, 22 bp, Artificial Sequence
  Probe
tggttcagtggtagaattctcg

SEQ ID NO: 42123 - DNA, 30 bp, Artificial Sequence
  Probe
tggttggcaaggtcagtgtgcctttctgcc

SEQ ID NO: 42124 - DNA, 26 bp, Artificial Sequence
  Probe
tggttgtagtccgtgcgagaataatg

SEQ ID NO: 42125 - DNA, 21 bp, Artificial Sequence
  Probe
tgtaaacaggagatcctgggt

SEQ ID NO: 42126 - DNA, 38 bp, Artificial Sequence; identical to SEQ ID NO: 8222
  Probe

SEQ ID NO: 42127 - DNA, 43 bp, Artificial Sequence; identical to SEQ ID NO: 8233
  Probe

SEQ ID NO: 42128 - DNA, 50 bp, Artificial Sequence; identical to SEQ ID NO: 8238
  Probe

SEQ ID NO: 42129 - DNA, 19 bp, Artificial Sequence
  Probe
tgtaatggttagcactctg

SEQ ID NO: 42130 - DNA, 22 bp, Artificial Sequence
  Probe
tgtagtccgtgcgagaataatg

SEQ ID NO: 42131 - DNA, 19 bp, Artificial Sequence
  Probe
tgtagtggttatcacgttc

SEQ ID NO: 42132 - DNA, 34 bp, Artificial Sequence; identical to SEQ ID NO: 24486
  Probe

SEQ ID NO: 42133 - DNA, 35 bp, Artificial Sequence
  Probe
tgtatgaggccccgggttcgatccccggcatctcc

SEQ ID NO: 42134 - DNA, 39 bp, Artificial Sequence; identical to SEQ ID NO: 24490
  Probe

SEQ ID NO: 42135 - DNA, 39 bp, Artificial Sequence; identical to SEQ ID NO: 24494
  Probe

SEQ ID NO: 42136 - DNA, 34 bp, Artificial Sequence
  Probe
tgtatgaggtcccgggttcgatccccggcatctc

SEQ ID NO: 42137 - DNA, 39 bp, Artificial Sequence; identical to SEQ ID NO: 24499
  Probe

SEQ ID NO: 42138 - DNA, 19 bp, Artificial Sequence
  Probe
tgtcacgcgggagaccggg

SEQ ID NO: 42139 - DNA, 33 bp, Artificial Sequence
  Probe
tgtcacgcgggagaccggggttcaattccccga

SEQ ID NO: 42140 - DNA, 41 bp, Artificial Sequence
  Probe
tgtcacgcgggagaccggggttcaattccccgacggggagg

SEQ ID NO: 42141 - DNA, 43 bp, Artificial Sequence; identical to SEQ ID NO: 8254
  Probe

SEQ ID NO: 42142 - DNA, 32 bp, Artificial Sequence
  Probe
tgtcacgcgggagaccggggttcgattcccca

SEQ ID NO: 42143 - DNA, 33 bp, Artificial Sequence
  Probe
tgtcacgcgggagaccggggttcgattccccaa

SEQ ID NO: 42144 - DNA, 33 bp, Artificial Sequence; identical to SEQ ID NO: 14450
  Probe

SEQ ID NO: 42145 - DNA, 34 bp, Artificial Sequence; identical to SEQ ID NO: 14451
  Probe

SEQ ID NO: 42146 - DNA, 35 bp, Artificial Sequence; identical to SEQ ID NO: 14452
  Probe

SEQ ID NO: 42147 - DNA, 41 bp, Artificial Sequence; identical to SEQ ID NO: 24517
  Probe

SEQ ID NO: 42148 - DNA, 46 bp, Artificial Sequence
  Probe
tgtcacgcgggagaccggggttcgattccccgacggggagaaaagt

SEQ ID NO: 42149 - DNA, 50 bp, Artificial Sequence
  Probe
tgtcacgcgggagaccggggttcgattccccgacggggagaaaagttgct

SEQ ID NO: 42150 - DNA, 50 bp, Artificial Sequence
  Probe
tgtcacgcgggagaccggggttcgattccccgacggggagacgaagcagt

SEQ ID NO: 42151 - DNA, 50 bp, Artificial Sequence
  Probe
tgtcacgcgggagaccggggttcgattccccgacggggagagtactagca

SEQ ID NO: 42152 - DNA, 41 bp, Artificial Sequence; identical to SEQ ID NO: 24521
  Probe

SEQ ID NO: 42153 - DNA, 50 bp, Artificial Sequence; identical to SEQ ID NO: 8256
  Probe

SEQ ID NO: 42154 - DNA, 43 bp, Artificial Sequence; identical to SEQ ID NO: 8257
  Probe

SEQ ID NO: 42155 - DNA, 50 bp, Artificial Sequence; identical to SEQ ID NO: 8259
  Probe

SEQ ID NO: 42156 - DNA, 46 bp, Artificial Sequence
  Probe
tgtcacgcgggagaccggggttcgattccccgacggggaggcagcc

SEQ ID NO: 42157 - DNA, 50 bp, Artificial Sequence
  Probe
tgtcacgcgggagaccggggttcgattccccgacggggaggcagccgtgc

SEQ ID NO: 42158 - DNA, 50 bp, Artificial Sequence; identical to SEQ ID NO: 24527
  Probe

SEQ ID NO: 42159 - DNA, 46 bp, Artificial Sequence
  Probe
tgtcacgcgggagaccggggttcgattccccgacggggaggccggg

SEQ ID NO: 42160 - DNA, 50 bp, Artificial Sequence
  Probe
tgtcacgcgggagaccggggttcgattccccgacggggaggccgggtact

SEQ ID NO: 42161 - DNA, 29 bp, Artificial Sequence
  Probe
tgtcgttagtctaggctgtcagctcttcc

SEQ ID NO: 42162 - DNA, 43 bp, Artificial Sequence; identical to SEQ ID NO: 8271
  Probe

SEQ ID NO: 42163 - DNA, 34 bp, Artificial Sequence
  Probe
tgtgagaggtcccgggttcaaatcccggacgagc

SEQ ID NO: 42164 - DNA, 35 bp, Artificial Sequence
  Probe
tgtgagaggtcccgggttcaaatcccggacgagcc

SEQ ID NO: 42165 - DNA, 21 bp, Artificial Sequence
  Probe
tgtgctccggagttacctcgt

SEQ ID NO: 42166 - DNA, 22 bp, Artificial Sequence
  Probe
tgtgctccggagttacctcgtt

SEQ ID NO: 42167 - DNA, 23 bp, Artificial Sequence
  Probe
tgtgctccggagttacctcgttt

SEQ ID NO: 42168 - DNA, 24 bp, Artificial Sequence
  Probe
tgtgctccggagttacctcgtttt

SEQ ID NO: 42169 - DNA, 35 bp, Artificial Sequence; identical to SEQ ID NO: 8289
  Probe

SEQ ID NO: 42170 - DNA, 28 bp, Artificial Sequence
  Probe
tgtttgtgggtttaagtcccattggtct

SEQ ID NO: 42171 - DNA, 34 bp, Artificial Sequence; identical to SEQ ID NO: 8304
  Probe

SEQ ID NO: 42172 - DNA, 50 bp, Artificial Sequence; identical to SEQ ID NO: 1785
  Probe

SEQ ID NO: 42173 - DNA, 41 bp, Artificial Sequence; identical to SEQ ID NO: 8318
  Probe

SEQ ID NO: 42174 - DNA, 42 bp, Artificial Sequence; identical to SEQ ID NO: 8319
  Probe

SEQ ID NO: 42175 - DNA, 32 bp, Artificial Sequence; identical to SEQ ID NO: 8326
  Probe

SEQ ID NO: 42176 - DNA, 20 bp, Artificial Sequence
  Probe
ttacacgcagaaggtcctgg

SEQ ID NO: 42177 - DNA, 21 bp, Artificial Sequence
  Probe
ttacacgcagaaggtcctggg

SEQ ID NO: 42178 - DNA, 42 bp, Artificial Sequence; identical to SEQ ID NO: 8339
  Probe

SEQ ID NO: 42179 - DNA, 43 bp, Artificial Sequence; identical to SEQ ID NO: 8340
  Probe

SEQ ID NO: 42180 - DNA, 28 bp, Artificial Sequence
  Probe
ttacagtcagaggttcaattcctcttct

SEQ ID NO: 42181 - DNA, 29 bp, Artificial Sequence
  Probe
ttacagtcagaggttcaattcctcttctt

SEQ ID NO: 42182 - DNA, 30 bp, Artificial Sequence; identical to SEQ ID NO: 24601
  Probe

SEQ ID NO: 42183 - DNA, 31 bp, Artificial Sequence
  Probe
ttacagtcagaggttcaattcctcttcttaa

SEQ ID NO: 42184 - DNA, 33 bp, Artificial Sequence; identical to SEQ ID NO: 24602
  Probe

SEQ ID NO: 42185 - DNA, 32 bp, Artificial Sequence; identical to SEQ ID NO: 8359
  Probe

SEQ ID NO: 42186 - DNA, 50 bp, Artificial Sequence; identical to SEQ ID NO: 1795
  Probe

SEQ ID NO: 42187 - DNA, 36 bp, Artificial Sequence; identical to SEQ ID NO: 8373
  Probe

SEQ ID NO: 42188 - DNA, 23 bp, Artificial Sequence
  Probe
ttaggatgcgagaggtcccgggt

SEQ ID NO: 42189 - DNA, 20 bp, Artificial Sequence
  Probe
ttagggtgcgagaggtcccg

SEQ ID NO: 42190 - DNA, 23 bp, Artificial Sequence
  Probe
ttagggtgcgagaggtcccgggt

SEQ ID NO: 42191 - DNA, 24 bp, Artificial Sequence
  Probe
ttagggtgcgagaggtcccgggtt

SEQ ID NO: 42192 - DNA, 23 bp, Artificial Sequence
  Probe
ttagtatagtggtgagtatcccc

SEQ ID NO: 42193 - DNA, 24 bp, Artificial Sequence
  Probe
ttagtatagtggtgagtatccccg

SEQ ID NO: 42194 - DNA, 24 bp, Artificial Sequence
  Probe
ttagtctaggctgtcagctcttcc

SEQ ID NO: 42195 - DNA, 18 bp, Artificial Sequence
  Probe
ttcaaatcacgtcggggt

SEQ ID NO: 42196 - DNA, 20 bp, Artificial Sequence
  Probe
ttcaaatcacgtcggggtca

SEQ ID NO: 42197 - DNA, 23 bp, Artificial Sequence
  Probe
ttcaaatcacgtcggggtcaaca

SEQ ID NO: 42198 - DNA, 30 bp, Artificial Sequence
  Probe
ttcaaatcacgtcggggtcagcggctattt

SEQ ID NO: 42199 - DNA, 31 bp, Artificial Sequence
  Probe
ttcaaatcacgtcggggtcagcggctatttt

SEQ ID NO: 42200 - DNA, 17 bp, Artificial Sequence
  Probe
ttcaaatcccggacgag

SEQ ID NO: 42201 - DNA, 23 bp, Artificial Sequence
  Probe
ttcaaatccgggtgccccctcaa

SEQ ID NO: 42202 - DNA, 32 bp, Artificial Sequence
  Probe
ttcaaatctcgctggggcctgcttccgtcttt

SEQ ID NO: 42203 - DNA, 18 bp, Artificial Sequence
  Probe
ttcaaatctcggtgggac

SEQ ID NO: 42204 - DNA, 27 bp, Artificial Sequence
  Probe
ttcaacttaacttgaccgctctgagct

SEQ ID NO: 42205 - DNA, 20 bp, Artificial Sequence
  Probe
ttcaagtcacgtcggggtca

SEQ ID NO: 42206 - DNA, 25 bp, Artificial Sequence
  Probe
ttcaatccccaatacctccaggttt

SEQ ID NO: 42207 - DNA, 26 bp, Artificial Sequence
  Probe
ttcaatccccaatacctccaggtttt

SEQ ID NO: 42208 - DNA, 30 bp, Artificial Sequence
  Probe
ttcaatccccggcacctccagcttcatttt

SEQ ID NO: 42209 - DNA, 23 bp, Artificial Sequence
  Probe
ttcaattcccggtcagggaacca

SEQ ID NO: 42210 - DNA, 28 bp, Artificial Sequence
  Probe
ttcaattctcgctggggcctgtgtgttt

SEQ ID NO: 42211 - DNA, 29 bp, Artificial Sequence
  Probe
ttcaattctcgctggggcctgtgtgtttt

SEQ ID NO: 42212 - DNA, 30 bp, Artificial Sequence
  Probe
ttcaattctcgctggggcctgtgtgttttt

SEQ ID NO: 42213 - DNA, 36 bp, Artificial Sequence
  Probe
ttcacccaggcggcccgggttcgactcccggtgtgg

SEQ ID NO: 42214 - DNA, 37 bp, Artificial Sequence
  Probe
ttcacccaggcggcccgggttcgactcccggtgtggg

SEQ ID NO: 42215 - DNA, 38 bp, Artificial Sequence
  Probe
ttcacccaggcggcccgggttcgactcccggtgtggga

SEQ ID NO: 42216 - DNA, 18 bp, Artificial Sequence
  Probe
ttcaggtcgcagtctccc

SEQ ID NO: 42217 - DNA, 50 bp, Artificial Sequence
  Probe
ttcaggtcgcagtctcccctggaggcgtgggttcgaatcccacttctgac

SEQ ID NO: 42218 - DNA, 37 bp, Artificial Sequence; identical to SEQ ID NO: 8397
  Probe

SEQ ID NO: 42219 - DNA, 38 bp, Artificial Sequence; identical to SEQ ID NO: 8398
  Probe

SEQ ID NO: 42220 - DNA, 41 bp, Artificial Sequence; identical to SEQ ID NO: 24655
  Probe

SEQ ID NO: 42221 - DNA, 21 bp, Artificial Sequence
  Probe
ttccaagcagttgacccgggt

SEQ ID NO: 42222 - DNA, 28 bp, Artificial Sequence
  Probe
ttccatagtgtagtggttatcacgtctg

SEQ ID NO: 42223 - DNA, 29 bp, Artificial Sequence
  Probe
ttccatagtgtagtggttatcacgtctgc

SEQ ID NO: 42224 - DNA, 31 bp, Artificial Sequence
  Probe
ttcccatatggtctagcggttaggattcctg

SEQ ID NO: 42225 - DNA, 20 bp, Artificial Sequence
  Probe
ttcccattcttgcgacccgg

SEQ ID NO: 42226 - DNA, 39 bp, Artificial Sequence
  Probe
ttcccattcttgcgacccgggttcgattcccgggcggcg

SEQ ID NO: 42227 - DNA, 50 bp, Artificial Sequence
  Probe
ttcccattcttgcgacccgggttcgattcccgggcggcgcacttagtttt

SEQ ID NO: 42228 - DNA, 21 bp, Artificial Sequence
  Probe
ttccctctggcagttctcaag

SEQ ID NO: 42229 - DNA, 29 bp, Artificial Sequence
  Probe
ttccctggtggtctagtggttaggattcg

SEQ ID NO: 42230 - DNA, 30 bp, Artificial Sequence; identical to SEQ ID NO: 12344
  Probe

SEQ ID NO: 42231 - DNA, 32 bp, Artificial Sequence
  Probe
ttccctggtggtctagtggttaggattcggcg

SEQ ID NO: 42232 - DNA, 27 bp, Artificial Sequence
  Probe
ttccgtagtgtagtggttatcacgttc

SEQ ID NO: 42233 - DNA, 29 bp, Artificial Sequence
  Probe
ttccgtagtgtagtggttatcacgttcgc

SEQ ID NO: 42234 - DNA, 30 bp, Artificial Sequence; identical to SEQ ID NO: 8425
  Probe

SEQ ID NO: 42235 - DNA, 50 bp, Artificial Sequence; identical to SEQ ID NO: 24697
  Probe

SEQ ID NO: 42236 - DNA, 50 bp, Artificial Sequence; identical to SEQ ID NO: 24701
  Probe

SEQ ID NO: 42237 - DNA, 18 bp, Artificial Sequence
  Probe
ttccgtgggtttgttttt

SEQ ID NO: 42238 - DNA, 50 bp, Artificial Sequence; identical to SEQ ID NO: 8432
  Probe

SEQ ID NO: 42239 - DNA, 29 bp, Artificial Sequence
  Probe
ttcgaacctcagagggggcagctgccatt

SEQ ID NO: 42240 - DNA, 30 bp, Artificial Sequence
  Probe
ttcgaacctcagagggggcagctgccattt

SEQ ID NO: 42241 - DNA, 31 bp, Artificial Sequence
  Probe
ttcgaacctcagagggggcagctgccatttt

SEQ ID NO: 42242 - DNA, 36 bp, Artificial Sequence; identical to SEQ ID NO: 8438
  Probe

SEQ ID NO: 42243 - DNA, 18 bp, Artificial Sequence
  Probe
ttcgaatcacgtcggggt

SEQ ID NO: 42244 - DNA, 20 bp, Artificial Sequence
  Probe
ttcgaatcacgtcggggtca

SEQ ID NO: 42245 - DNA, 31 bp, Artificial Sequence
  Probe
ttcgaatcccaccactgccagtggtacgttt

SEQ ID NO: 42246 - DNA, 20 bp, Artificial Sequence
  Probe
ttcgaatcccaccagagtcg

SEQ ID NO: 42247 - DNA, 20 bp, Artificial Sequence
  Probe
ttcgaatcccaccgctgcca

SEQ ID NO: 42248 - DNA, 23 bp, Artificial Sequence
  Probe
ttcgaatcccaccgctgccacac

SEQ ID NO: 42249 - DNA, 23 bp, Artificial Sequence
  Probe
ttcgaatcccaccgctgccaggt

SEQ ID NO: 42250 - DNA, 33 bp, Artificial Sequence
  Probe
ttcgaatcccaccgctgccaggtgcttcccttt

SEQ ID NO: 42251 - DNA, 34 bp, Artificial Sequence
  Probe
ttcgaatcccaccgctgccaggtgcttccctttt

SEQ ID NO: 42252 - DNA, 28 bp, Artificial Sequence
  Probe
ttcgaatcccacttctgacacatacttt

SEQ ID NO: 42253 - DNA, 29 bp, Artificial Sequence
  Probe
ttcgaatcccacttctgacacattcgttt

SEQ ID NO: 42254 - DNA, 23 bp, Artificial Sequence
  Probe
ttcgaatcccagcggtgcctccg

SEQ ID NO: 42255 - DNA, 30 bp, Artificial Sequence
  Probe
ttcgaatcctgctcacagcgtcactagttt

SEQ ID NO: 42256 - DNA, 31 bp, Artificial Sequence
  Probe
ttcgacccccggctcctccagttgtccattt

SEQ ID NO: 42257 - DNA, 32 bp, Artificial Sequence
  Probe
ttcgacccccggctcctccagttgtccatttt

SEQ ID NO: 42258 - DNA, 23 bp, Artificial Sequence
  Probe
ttcgactcccggtgtgggaacgc

SEQ ID NO: 42259 - DNA, 20 bp, Artificial Sequence
  Probe
ttcgactcctggctggctcg

SEQ ID NO: 42260 - DNA, 34 bp, Artificial Sequence
  Probe
ttcgagcccacccaggaacgcttgttcgagcttt

SEQ ID NO: 42261 - DNA, 23 bp, Artificial Sequence
  Probe
ttcgagcccacccagggacgcct

SEQ ID NO: 42262 - DNA, 31 bp, Artificial Sequence
  Probe
ttcgagcccacccagggacgcgctctccttt

SEQ ID NO: 42263 - DNA, 34 bp, Artificial Sequence
  Probe
ttcgagcccacccagggacgcttattggaacttt

SEQ ID NO: 42264 - DNA, 34 bp, Artificial Sequence
  Probe
ttcgagcccacccagggacggtcagtgcttcttt

SEQ ID NO: 42265 - DNA, 18 bp, Artificial Sequence
  Probe
ttcgagccccagtggaac

SEQ ID NO: 42266 - DNA, 20 bp, Artificial Sequence
  Probe
ttcgagccccagtggaacca

SEQ ID NO: 42267 - DNA, 31 bp, Artificial Sequence
  Probe
ttcgagcctcacacggggcagtctaacgttt

SEQ ID NO: 42268 - DNA, 29 bp, Artificial Sequence
  Probe
ttcgagcctcacctggagcaagacccttt

SEQ ID NO: 42269 - DNA, 30 bp, Artificial Sequence
  Probe
ttcgagcctcacctggagcaagaccctttt

SEQ ID NO: 42270 - DNA, 27 bp, Artificial Sequence
  Probe
ttcgagcctcacctggagcattgtttt

SEQ ID NO: 42271 - DNA, 23 bp, Artificial Sequence
  Probe
ttcgagtcccacctggggtgtcg

SEQ ID NO: 42272 - DNA, 32 bp, Artificial Sequence
  Probe
ttcgagtcccatctggggtggcctgtgacttt

SEQ ID NO: 42273 - DNA, 33 bp, Artificial Sequence
  Probe
ttcgagtcccatctggggtggcctgtgactttt

SEQ ID NO: 42274 - DNA, 29 bp, Artificial Sequence
  Probe
ttcgagtcccggcggagtcgtaacgcttt

SEQ ID NO: 42275 - DNA, 30 bp, Artificial Sequence
  Probe
ttcgagtcccggcggagtcgtaacgctttt

SEQ ID NO: 42276 - DNA, 23 bp, Artificial Sequence
  Probe
ttcgagtcccttcgtggtcgttg

SEQ ID NO: 42277 - DNA, 37 bp, Artificial Sequence
  Probe
ttcgagtcccttcgtggtcgttgccatgttaacgttt

SEQ ID NO: 42278 - DNA, 37 bp, Artificial Sequence
  Probe
ttcgatccccagcacttccacaagtacatttccttat

SEQ ID NO: 42279 - DNA, 20 bp, Artificial Sequence
  Probe
ttcgatccccagcatctcca

SEQ ID NO: 42280 - DNA, 23 bp, Artificial Sequence
  Probe
ttcgatccccagcatctccagtg

SEQ ID NO: 42281 - DNA, 27 bp, Artificial Sequence
  Probe
ttcgatccccagcatctccagtgtttt

SEQ ID NO: 42282 - DNA, 20 bp, Artificial Sequence
  Probe
ttcgatccccagtacctcca

SEQ ID NO: 42283 - DNA, 18 bp, Artificial Sequence
  Probe
ttcgatccccggcacctc

SEQ ID NO: 42284 - DNA, 20 bp, Artificial Sequence
  Probe
ttcgatccccggcacctcca

SEQ ID NO: 42285 - DNA, 30 bp, Artificial Sequence
  Probe
ttcgatccccggcatctccagtgtagtttt

SEQ ID NO: 42286 - DNA, 23 bp, Artificial Sequence
  Probe
ttcgatccccggcatctccattg

SEQ ID NO: 42287 - DNA, 23 bp, Artificial Sequence
  Probe
ttcgatcctcacacggggcacaa

SEQ ID NO: 42288 - DNA, 29 bp, Artificial Sequence
  Probe
ttcgatcctcacacggggcacaataattt

SEQ ID NO: 42289 - DNA, 30 bp, Artificial Sequence
  Probe
ttcgatcctcacacggggcacaataatttt

SEQ ID NO: 42290 - DNA, 24 bp, Artificial Sequence
  Probe
ttcgatcctcacctggagcacttt

SEQ ID NO: 42291 - DNA, 25 bp, Artificial Sequence
  Probe
ttcgatcctcacctggagcactttt

SEQ ID NO: 42292 - DNA, 36 bp, Artificial Sequence
  Probe
ttcgatcctcgctggggcctcctgttggcttacttt

SEQ ID NO: 42293 - DNA, 23 bp, Artificial Sequence
  Probe
ttcgattccccgacggggaggca

SEQ ID NO: 42294 - DNA, 34 bp, Artificial Sequence
  Probe
ttcgattccccgacggggaggcagccgtgctttt

SEQ ID NO: 42295 - DNA, 32 bp, Artificial Sequence
  Probe
ttcgattcccggccaatgcacgagtacagttt

SEQ ID NO: 42296 - DNA, 33 bp, Artificial Sequence
  Probe
ttcgattcccggccaatgcacgagtacagtttt

SEQ ID NO: 42297 - DNA, 31 bp, Artificial Sequence
  Probe
ttcgattcccggtcaggaaagtaagccgttt

SEQ ID NO: 42298 - DNA, 23 bp, Artificial Sequence
  Probe
ttcgattcccggtcagggaacaa

SEQ ID NO: 42299 - DNA, 20 bp, Artificial Sequence
  Probe
ttcgggtgcgagaggtcccg

SEQ ID NO: 42300 - DNA, 23 bp, Artificial Sequence
  Probe
ttcgggtgcgagaggtcccgggt

SEQ ID NO: 42301 - DNA, 24 bp, Artificial Sequence
  Probe
ttcgggtgcgagaggtcccgggtt

SEQ ID NO: 42302 - DNA, 30 bp, Artificial Sequence
  Probe
ttctcaaactttaaatgggcaagaagccca

SEQ ID NO: 42303 - DNA, 32 bp, Artificial Sequence
  Probe
ttctcaaactttaaatgggcaagaagcccagc

SEQ ID NO: 42304 - DNA, 33 bp, Artificial Sequence; identical to SEQ ID NO: 24744
  Probe

SEQ ID NO: 42305 - DNA, 45 bp, Artificial Sequence; identical to SEQ ID NO: 8473
  Probe

SEQ ID NO: 42306 - DNA, 43 bp, Artificial Sequence; identical to SEQ ID NO: 8477
  Probe

SEQ ID NO: 42307 - DNA, 50 bp, Artificial Sequence; identical to SEQ ID NO: 8478
  Probe

SEQ ID NO: 42308 - DNA, 22 bp, Artificial Sequence
  Probe
ttgggtgcgagaggtcccgggt

SEQ ID NO: 42309 - DNA, 41 bp, Artificial Sequence; identical to SEQ ID NO: 8481
  Probe

SEQ ID NO: 42310 - DNA, 27 bp, Artificial Sequence
  Probe
ttggtggtatagtggtaagcatagctg

SEQ ID NO: 42311 - DNA, 27 bp, Artificial Sequence
  Probe
ttggtggtatagtggtgagcatagctg

SEQ ID NO: 42312 - DNA, 27 bp, Artificial Sequence
  Probe
ttggtggtatagtggttagcatagctg

SEQ ID NO: 42313 - DNA, 24 bp, Artificial Sequence
  Probe
ttggtggttcagtggtagaattct

SEQ ID NO: 42314 - DNA, 25 bp, Artificial Sequence
  Probe
ttggtggttcagtggtagaattctc

SEQ ID NO: 42315 - DNA, 26 bp, Artificial Sequence
  Probe
ttggtggttcagtggtagaattctcg

SEQ ID NO: 42316 - DNA, 27 bp, Artificial Sequence
  Probe
ttggtggttcagtggtagaattctcgc

SEQ ID NO: 42317 - DNA, 22 bp, Artificial Sequence
  Probe
ttgtaaacaggagatcctgggt

SEQ ID NO: 42318 - DNA, 20 bp, Artificial Sequence
  Probe
ttgtggccgcagcaacctcg

SEQ ID NO: 42319 - DNA, 39 bp, Artificial Sequence
  Probe
tttaagccgcgcattggtggttcagtggtagaattctcg

SEQ ID NO: 42320 - DNA, 21 bp, Artificial Sequence
  Probe
tttacacgcagaaggtcctgg

SEQ ID NO: 42321 - DNA, 22 bp, Artificial Sequence
  Probe
tttacacgcagaaggtcctggg

SEQ ID NO: 42322 - DNA, 45 bp, Artificial Sequence
  Probe
tttacacgcagaaggtcctgggttcaagccccagtggaaccatgg

SEQ ID NO: 42323 - DNA, 39 bp, Artificial Sequence
  Probe
tttacacgcagaaggtcctgggttcgagccccagtggaa

SEQ ID NO: 42324 - DNA, 45 bp, Artificial Sequence; identical to SEQ ID NO: 24797
  Probe

SEQ ID NO: 42325 - DNA, 50 bp, Artificial Sequence
  Probe
tttacacgcagaaggtcctgggttcgagccccagtggaaccacggcgtga

SEQ ID NO: 42326 - DNA, 45 bp, Artificial Sequence
  Probe
tttacacgcagaaggtcctgggttcgagccccagtggaaccatag

SEQ ID NO: 42327 - DNA, 30 bp, Artificial Sequence; identical to SEQ ID NO: 24800
  Probe

SEQ ID NO: 42328 - DNA, 31 bp, Artificial Sequence; identical to SEQ ID NO: 24801
  Probe

SEQ ID NO: 42329 - DNA, 34 bp, Artificial Sequence; identical to SEQ ID NO: 24803
  Probe

SEQ ID NO: 42330 - DNA, 33 bp, Artificial Sequence; identical to SEQ ID NO: 8527
  Probe

SEQ ID NO: 42331 - DNA, 28 bp, Artificial Sequence
  Probe
tttccgtagtgtagtggttatcacgttc

SEQ ID NO: 42332 - DNA, 30 bp, Artificial Sequence; identical to SEQ ID NO: 24813
  Probe

SEQ ID NO: 42333 - DNA, 46 bp, Artificial Sequence; identical to SEQ ID NO: 8532
  Probe

SEQ ID NO: 42334 - DNA, 49 bp, Artificial Sequence
  Probe
tttgatagagtaaataataggagcttaaacccccttatttctaggacta

SEQ ID NO: 42335 - DNA, 50 bp, Artificial Sequence
  Probe
tttgatagagtaaataataggagcttaaacccccttatttctaggactat

SEQ ID NO: 42336 - DNA, 45 bp, Artificial Sequence
  Probe
tttgcacgtatgaggccccgggttcaatccccggcatctccagac

SEQ ID NO: 42337 - DNA, 24 bp, Artificial Sequence
  Probe
tttggccttttcgagatactgttt

SEQ ID NO: 42338 - DNA, 25 bp, Artificial Sequence
  Probe
tttggccttttcgagatactgtttt

SEQ ID NO: 42339 - DNA, 20 bp, Artificial Sequence
  Probe
tttgggtgcgagaggtcccg

SEQ ID NO: 42340 - DNA, 21 bp, Artificial Sequence
  Probe
tttgggtgcgagaggtcccgg

SEQ ID NO: 42341 - DNA, 22 bp, Artificial Sequence
  Probe
tttgggtgcgagaggtcccggg

SEQ ID NO: 42342 - DNA, 23 bp, Artificial Sequence
  Probe
tttgggtgcgagaggtcccgggt

SEQ ID NO: 42343 - DNA, 24 bp, Artificial Sequence
  Probe
tttgggtgcgagaggtcccgggtt

SEQ ID NO: 42344 - DNA, 42 bp, Artificial Sequence; identical to SEQ ID NO: 24831
  Probe

SEQ ID NO: 42345 - DNA, 49 bp, Artificial Sequence
  Probe
ttttcacccaggcggcccgggttcgactcccggtgtgggaacgccgaaa

SEQ ID NO: 42346 - DNA, 50 bp, Artificial Sequence
  Probe
ttttcacccaggcggcccgggttcgactcccggtgtgggaacgccgaaat

SEQ ID NO: 42347 - DNA, 50 bp, Artificial Sequence
  Probe
ttttcacccaggcggcccgggttcgactcccggtgtgggaatgactggac

SEQ ID NO: 42348 - DNA, 50 bp, Artificial Sequence
  Probe
ttttcacccaggtggcccgggttcgactcccggtatgggaacgcttcctt

SEQ ID NO: 42349 - DNA, 50 bp, Artificial Sequence; identical to SEQ ID NO: 4
  Probe

SEQ ID NO: 42350 - DNA, 50 bp, Artificial Sequence; identical to SEQ ID NO: 14
  Probe

SEQ ID NO: 42351 - DNA, 50 bp, Artificial Sequence; identical to SEQ ID NO: 25
  Probe

SEQ ID NO: 42352 - DNA, 30 bp, Artificial Sequence; identical to SEQ ID NO: 12470
  Probe

SEQ ID NO: 42353 - DNA, 34 bp, Artificial Sequence; identical to SEQ ID NO: 33
  Probe

SEQ ID NO: 42354 - DNA, 50 bp, Artificial Sequence; identical to SEQ ID NO: 39
  Probe

SEQ ID NO: 42355 - DNA, 18 bp, Artificial Sequence
  Probe
aacagctatccattggtc

SEQ ID NO: 42356 - DNA, 19 bp, Artificial Sequence
  Probe
aacagctatccattggtct

SEQ ID NO: 42357 - DNA, 28 bp, Artificial Sequence
  Probe
aacagctatccattggtcttaggcccca

SEQ ID NO: 42358 - DNA, 36 bp, Artificial Sequence; identical to SEQ ID NO: 14746
  Probe

SEQ ID NO: 42359 - DNA, 50 bp, Artificial Sequence; identical to SEQ ID NO: 42
  Probe

SEQ ID NO: 42360 - DNA, 50 bp, Artificial Sequence; identical to SEQ ID NO: 47
  Probe

SEQ ID NO: 42361 - DNA, 17 bp, Artificial Sequence
  Probe
aaccggagatgaaaacc

SEQ ID NO: 42362 - DNA, 18 bp, Artificial Sequence
  Probe
aaccggagatgaaaacct

SEQ ID NO: 42363 - DNA, 24 bp, Artificial Sequence
  Probe
aaccggagatgaaaacctttttcc

SEQ ID NO: 42364 - DNA, 27 bp, Artificial Sequence
  Probe
aaccggagatgaaaacctttttccaag

SEQ ID NO: 42365 - DNA, 29 bp, Artificial Sequence
  Probe
aaccggagatgaaaacctttttccaagga

SEQ ID NO: 42366 - DNA, 30 bp, Artificial Sequence; identical to SEQ ID NO: 52
  Probe

SEQ ID NO: 42367 - DNA, 31 bp, Artificial Sequence; identical to SEQ ID NO: 53
  Probe

SEQ ID NO: 42368 - DNA, 38 bp, Artificial Sequence; identical to SEQ ID NO: 61
  Probe

SEQ ID NO: 42369 - DNA, 40 bp, Artificial Sequence; identical to SEQ ID NO: 12486
  Probe

SEQ ID NO: 42370 - DNA, 29 bp, Artificial Sequence
  Probe
aagattccaggttcgactcctggctggct

SEQ ID NO: 42371 - DNA, 50 bp, Artificial Sequence; identical to SEQ ID NO: 80
  Probe

SEQ ID NO: 42372 - DNA, 31 bp, Artificial Sequence; identical to SEQ ID NO: 15149
  Probe

SEQ ID NO: 42373 - DNA, 29 bp, Artificial Sequence
  Probe
aaggttggtggttcgagcccacccaggga

SEQ ID NO: 42374 - DNA, 31 bp, Artificial Sequence
  Probe
aaggttggtggttcgagcccacccagggacg

SEQ ID NO: 42375 - DNA, 32 bp, Artificial Sequence
  Probe
aaggttggtggttcgagcccacccagggacgc

SEQ ID NO: 42376 - DNA, 26 bp, Artificial Sequence
  Probe
aagtgtttgtgggtttaagtcccatt

SEQ ID NO: 42377 - DNA, 30 bp, Artificial Sequence; identical to SEQ ID NO: 2390
  Probe

SEQ ID NO: 42378 - DNA, 31 bp, Artificial Sequence; identical to SEQ ID NO: 86
  Probe

SEQ ID NO: 42379 - DNA, 32 bp, Artificial Sequence; identical to SEQ ID NO: 2391
  Probe

SEQ ID NO: 42380 - DNA, 20 bp, Artificial Sequence
  Probe
aatccagcgatccgagttca

SEQ ID NO: 42381 - DNA, 22 bp, Artificial Sequence
  Probe
aatccagcgatccgagttcaaa

SEQ ID NO: 42382 - DNA, 20 bp, Artificial Sequence
  Probe
aatccccggcacctccacca

SEQ ID NO: 42383 - DNA, 30 bp, Artificial Sequence; identical to SEQ ID NO: 2459
  Probe

SEQ ID NO: 42384 - DNA, 50 bp, Artificial Sequence; identical to SEQ ID NO: 117
  Probe

SEQ ID NO: 42385 - DNA, 30 bp, Artificial Sequence; identical to SEQ ID NO: 2562
  Probe

SEQ ID NO: 42386 - DNA, 43 bp, Artificial Sequence; identical to SEQ ID NO: 119
  Probe

SEQ ID NO: 42387 - DNA, 43 bp, Artificial Sequence; identical to SEQ ID NO: 2601
  Probe

SEQ ID NO: 42388 - DNA, 50 bp, Artificial Sequence; identical to SEQ ID NO: 124
  Probe

SEQ ID NO: 42389 - DNA, 39 bp, Artificial Sequence; identical to SEQ ID NO: 12524
  Probe

SEQ ID NO: 42390 - DNA, 40 bp, Artificial Sequence; identical to SEQ ID NO: 12525
  Probe

SEQ ID NO: 42391 - DNA, 18 bp, Artificial Sequence
  Probe
acacgcgaaaggtccccg

SEQ ID NO: 42392 - DNA, 20 bp, Artificial Sequence
  Probe
acacgcgaaaggtccccggt

SEQ ID NO: 42393 - DNA, 24 bp, Artificial Sequence
  Probe
acacgcgaaaggtccccggttcga

SEQ ID NO: 42394 - DNA, 35 bp, Artificial Sequence; identical to SEQ ID NO: 12530
  Probe

SEQ ID NO: 42395 - DNA, 37 bp, Artificial Sequence; identical to SEQ ID NO: 37792
  Probe

SEQ ID NO: 42396 - DNA, 18 bp, Artificial Sequence
  Probe
acagaccaagagccttca

SEQ ID NO: 42397 - DNA, 17 bp, Artificial Sequence
  Probe
acagaggcttacgaccc

SEQ ID NO: 42398 - DNA, 27 bp, Artificial Sequence
  Probe
acagaggcttacgaccccttatttacc

SEQ ID NO: 42399 - DNA, 17 bp, Artificial Sequence
  Probe
acagctatccattggtc

SEQ ID NO: 42400 - DNA, 18 bp, Artificial Sequence
  Probe
acagctatccattggtct

SEQ ID NO: 42401 - DNA, 50 bp, Artificial Sequence; identical to SEQ ID NO: 138
  Probe

SEQ ID NO: 42402 - DNA, 16 bp, Artificial Sequence
  Probe
accaggatggccgagt

SEQ ID NO: 42403 - DNA, 32 bp, Artificial Sequence; identical to SEQ ID NO: 153
  Probe

SEQ ID NO: 42404 - DNA, 33 bp, Artificial Sequence; identical to SEQ ID NO: 154
  Probe

SEQ ID NO: 42405 - DNA, 34 bp, Artificial Sequence; identical to SEQ ID NO: 155
  Probe

SEQ ID NO: 42406 - DNA, 35 bp, Artificial Sequence; identical to SEQ ID NO: 156
  Probe

SEQ ID NO: 42407 - DNA, 34 bp, Artificial Sequence; identical to SEQ ID NO: 157
  Probe

SEQ ID NO: 42408 - DNA, 36 bp, Artificial Sequence; identical to SEQ ID NO: 158
  Probe

SEQ ID NO: 42409 - DNA, 37 bp, Artificial Sequence; identical to SEQ ID NO: 159
  Probe

SEQ ID NO: 42410 - DNA, 38 bp, Artificial Sequence; identical to SEQ ID NO: 15640
  Probe

SEQ ID NO: 42411 - DNA, 34 bp, Artificial Sequence
  Probe
accgaaaggttggtggttcgatcccacccaggga

SEQ ID NO: 42412 - DNA, 36 bp, Artificial Sequence
  Probe
accgaaaggttggtggttcgatcccacccagggacg

SEQ ID NO: 42413 - DNA, 35 bp, Artificial Sequence; identical to SEQ ID NO: 12558
  Probe

SEQ ID NO: 42414 - DNA, 16 bp, Artificial Sequence
  Probe
accggagatgaaaacc

SEQ ID NO: 42415 - DNA, 17 bp, Artificial Sequence
  Probe
accggagatgaaaacct

SEQ ID NO: 42416 - DNA, 18 bp, Artificial Sequence
  Probe
accggagatgaaaacctt

SEQ ID NO: 42417 - DNA, 19 bp, Artificial Sequence
  Probe
accggagatgaaaaccttt

SEQ ID NO: 42418 - DNA, 20 bp, Artificial Sequence
  Probe
accggagatgaaaacctttt

SEQ ID NO: 42419 - DNA, 23 bp, Artificial Sequence
  Probe
accggagatgaaaacctttttcc

SEQ ID NO: 42420 - DNA, 24 bp, Artificial Sequence
  Probe
accggagatgaaaacctttttcca

SEQ ID NO: 42421 - DNA, 26 bp, Artificial Sequence
  Probe
accggagatgaaaacctttttccaag

SEQ ID NO: 42422 - DNA, 28 bp, Artificial Sequence
  Probe
accggagatgaaaacctttttccaagga

SEQ ID NO: 42423 - DNA, 29 bp, Artificial Sequence
  Probe
accggagatgaaaacctttttccaaggac

SEQ ID NO: 42424 - DNA, 30 bp, Artificial Sequence; identical to SEQ ID NO: 165
  Probe

SEQ ID NO: 42425 - DNA, 16 bp, Artificial Sequence
  Probe
accgggcggaaacacc

SEQ ID NO: 42426 - DNA, 27 bp, Artificial Sequence
  Probe
accggggttcaattccccgacggggag

SEQ ID NO: 42427 - DNA, 24 bp, Artificial Sequence
  Probe
accggggttcgattccccgacggg

SEQ ID NO: 42428 - DNA, 26 bp, Artificial Sequence
  Probe
accggggttcgattccccgacgggga

SEQ ID NO: 42429 - DNA, 27 bp, Artificial Sequence
  Probe
accggggttcgattccccgacggggag

SEQ ID NO: 42430 - DNA, 17 bp, Artificial Sequence
  Probe
acctcctcaaagcaata

SEQ ID NO: 42431 - DNA, 35 bp, Artificial Sequence; identical to SEQ ID NO: 12575
  Probe

SEQ ID NO: 42432 - DNA, 36 bp, Artificial Sequence; identical to SEQ ID NO: 2844
  Probe

SEQ ID NO: 42433 - DNA, 37 bp, Artificial Sequence; identical to SEQ ID NO: 166
  Probe

SEQ ID NO: 42434 - DNA, 38 bp, Artificial Sequence; identical to SEQ ID NO: 167
  Probe

SEQ ID NO: 42435 - DNA, 18 bp, Artificial Sequence
  Probe
acgcgaaaggtccccggt

SEQ ID NO: 42436 - DNA, 16 bp, Artificial Sequence
  Probe
acgcgggagaccgggg

SEQ ID NO: 42437 - DNA, 17 bp, Artificial Sequence
  Probe
acgcgggagaccggggt

SEQ ID NO: 42438 - DNA, 18 bp, Artificial Sequence
  Probe
acgcgggagaccggggtt

SEQ ID NO: 42439 - DNA, 31 bp, Artificial Sequence; identical to SEQ ID NO: 176
  Probe

SEQ ID NO: 42440 - DNA, 32 bp, Artificial Sequence; identical to SEQ ID NO: 177
  Probe

SEQ ID NO: 42441 - DNA, 33 bp, Artificial Sequence; identical to SEQ ID NO: 178
  Probe

SEQ ID NO: 42442 - DNA, 34 bp, Artificial Sequence; identical to SEQ ID NO: 179
  Probe

SEQ ID NO: 42443 - DNA, 35 bp, Artificial Sequence; identical to SEQ ID NO: 12593
  Probe

SEQ ID NO: 42444 - DNA, 36 bp, Artificial Sequence; identical to SEQ ID NO: 180
  Probe

SEQ ID NO: 42445 - DNA, 31 bp, Artificial Sequence; identical to SEQ ID NO: 183
  Probe

SEQ ID NO: 42446 - DNA, 32 bp, Artificial Sequence; identical to SEQ ID NO: 184
  Probe

SEQ ID NO: 42447 - DNA, 33 bp, Artificial Sequence; identical to SEQ ID NO: 185
  Probe

SEQ ID NO: 42448 - DNA, 34 bp, Artificial Sequence; identical to SEQ ID NO: 186
  Probe

SEQ ID NO: 42449 - DNA, 35 bp, Artificial Sequence; identical to SEQ ID NO: 187
  Probe

SEQ ID NO: 42450 - DNA, 36 bp, Artificial Sequence; identical to SEQ ID NO: 188
  Probe

SEQ ID NO: 42451 - DNA, 17 bp, Artificial Sequence
  Probe
acgcgggaggcccgggt

SEQ ID NO: 42452 - DNA, 18 bp, Artificial Sequence
  Probe
acgcgggaggcccgggtt

SEQ ID NO: 42453 - DNA, 27 bp, Artificial Sequence
  Probe
acgcgtgggttcgaatcccatcctcgt

SEQ ID NO: 42454 - DNA, 29 bp, Artificial Sequence
  Probe
actaagtgtttgtgggtttaagtcccatt

SEQ ID NO: 42455 - DNA, 31 bp, Artificial Sequence; identical to SEQ ID NO: 12612
  Probe

SEQ ID NO: 42456 - DNA, 32 bp, Artificial Sequence; identical to SEQ ID NO: 15903
  Probe

SEQ ID NO: 42457 - DNA, 33 bp, Artificial Sequence; identical to SEQ ID NO: 191
  Probe

SEQ ID NO: 42458 - DNA, 34 bp, Artificial Sequence; identical to SEQ ID NO: 192
  Probe

SEQ ID NO: 42459 - DNA, 35 bp, Artificial Sequence; identical to SEQ ID NO: 193
  Probe

SEQ ID NO: 42460 - DNA, 36 bp, Artificial Sequence; identical to SEQ ID NO: 2894
  Probe

SEQ ID NO: 42461 - DNA, 50 bp, Artificial Sequence; identical to SEQ ID NO: 199
  Probe

SEQ ID NO: 42462 - DNA, 39 bp, Artificial Sequence; identical to SEQ ID NO: 12625
  Probe

SEQ ID NO: 42463 - DNA, 50 bp, Artificial Sequence; identical to SEQ ID NO: 201
  Probe

SEQ ID NO: 42464 - DNA, 35 bp, Artificial Sequence; identical to SEQ ID NO: 3024
  Probe

SEQ ID NO: 42465 - DNA, 36 bp, Artificial Sequence; identical to SEQ ID NO: 3025
  Probe

SEQ ID NO: 42466 - DNA, 37 bp, Artificial Sequence; identical to SEQ ID NO: 203
  Probe

SEQ ID NO: 42467 - DNA, 38 bp, Artificial Sequence; identical to SEQ ID NO: 204
  Probe

SEQ ID NO: 42468 - DNA, 39 bp, Artificial Sequence; identical to SEQ ID NO: 205
  Probe

SEQ ID NO: 42469 - DNA, 30 bp, Artificial Sequence; identical to SEQ ID NO: 209
  Probe

SEQ ID NO: 42470 - DNA, 31 bp, Artificial Sequence; identical to SEQ ID NO: 210
  Probe

SEQ ID NO: 42471 - DNA, 32 bp, Artificial Sequence; identical to SEQ ID NO: 211
  Probe

SEQ ID NO: 42472 - DNA, 41 bp, Artificial Sequence; identical to SEQ ID NO: 3037
  Probe

SEQ ID NO: 42473 - DNA, 27 bp, Artificial Sequence
  Probe
agaactgctaactcatgcccccatgtc

SEQ ID NO: 42474 - DNA, 28 bp, Artificial Sequence
  Probe
agaactgctaactcatgcccccatgtct

SEQ ID NO: 42475 - DNA, 32 bp, Artificial Sequence; identical to SEQ ID NO: 3066
  Probe

SEQ ID NO: 42476 - DNA, 44 bp, Artificial Sequence; identical to SEQ ID NO: 222
  Probe

SEQ ID NO: 42477 - DNA, 46 bp, Artificial Sequence; identical to SEQ ID NO: 224
  Probe

SEQ ID NO: 42478 - DNA, 33 bp, Artificial Sequence; identical to SEQ ID NO: 3094
  Probe

SEQ ID NO: 42479 - DNA, 50 bp, Artificial Sequence; identical to SEQ ID NO: 235
  Probe

SEQ ID NO: 42480 - DNA, 23 bp, Artificial Sequence
  Probe
agaccggggttcaattccccgac

SEQ ID NO: 42481 - DNA, 28 bp, Artificial Sequence
  Probe
agaccggggttcaattccccgacgggga

SEQ ID NO: 42482 - DNA, 29 bp, Artificial Sequence
  Probe
agaccggggttcaattccccgacggggag

SEQ ID NO: 42483 - DNA, 23 bp, Artificial Sequence
  Probe
agaccggggttcgattccccgac

SEQ ID NO: 42484 - DNA, 24 bp, Artificial Sequence
  Probe
agaccggggttcgattccccgacg

SEQ ID NO: 42485 - DNA, 25 bp, Artificial Sequence
  Probe
agaccggggttcgattccccgacgg

SEQ ID NO: 42486 - DNA, 27 bp, Artificial Sequence
  Probe
agaccggggttcgattccccgacgggg

SEQ ID NO: 42487 - DNA, 28 bp, Artificial Sequence
  Probe
agaccggggttcgattccccgacgggga

SEQ ID NO: 42488 - DNA, 29 bp, Artificial Sequence
  Probe
agaccggggttcgattccccgacggggag

SEQ ID NO: 42489 - DNA, 50 bp, Artificial Sequence; identical to SEQ ID NO: 246
  Probe

SEQ ID NO: 42490 - DNA, 50 bp, Artificial Sequence
  Probe
agagcatgggactcttaatcccagggtcgtgggttcgagccccacgttgg

SEQ ID NO: 42491 - DNA, 17 bp, Artificial Sequence
  Probe
agagcccggtaatcgca

SEQ ID NO: 42492 - DNA, 19 bp, Artificial Sequence
  Probe
agagcccggtaatcgcata

SEQ ID NO: 42493 - DNA, 40 bp, Artificial Sequence; identical to SEQ ID NO: 3145
  Probe

SEQ ID NO: 42494 - DNA, 42 bp, Artificial Sequence; identical to SEQ ID NO: 16221
  Probe

SEQ ID NO: 42495 - DNA, 50 bp, Artificial Sequence; identical to SEQ ID NO: 3146
  Probe

SEQ ID NO: 42496 - DNA, 26 bp, Artificial Sequence
  Probe
agagtaaataataggagcttaaaccc

SEQ ID NO: 42497 - DNA, 27 bp, Artificial Sequence
  Probe
agagtaaataataggagcttaaacccc

SEQ ID NO: 42498 - DNA, 28 bp, Artificial Sequence
  Probe
agagtaaataataggagcttaaaccccc

SEQ ID NO: 42499 - DNA, 29 bp, Artificial Sequence
  Probe
agagtaaataataggagcttaaaccccct

SEQ ID NO: 42500 - DNA, 30 bp, Artificial Sequence; identical to SEQ ID NO: 251
  Probe

SEQ ID NO: 42501 - DNA, 31 bp, Artificial Sequence; identical to SEQ ID NO: 252
  Probe

SEQ ID NO: 42502 - DNA, 36 bp, Artificial Sequence; identical to SEQ ID NO: 255
  Probe

SEQ ID NO: 42503 - DNA, 37 bp, Artificial Sequence; identical to SEQ ID NO: 256
  Probe

SEQ ID NO: 42504 - DNA, 28 bp, Artificial Sequence
  Probe
agattccaggttcgactcctggctggct

SEQ ID NO: 42505 - DNA, 28 bp, Artificial Sequence
  Probe
agattgagggttcgagtcccttcgtggt

SEQ ID NO: 42506 - DNA, 29 bp, Artificial Sequence
  Probe
agcactctggactctgaatccagcgatcc

SEQ ID NO: 42507 - DNA, 30 bp, Artificial Sequence; identical to SEQ ID NO: 270
  Probe

SEQ ID NO: 42508 - DNA, 31 bp, Artificial Sequence; identical to SEQ ID NO: 271
  Probe

SEQ ID NO: 42509 - DNA, 32 bp, Artificial Sequence; identical to SEQ ID NO: 3254
  Probe

SEQ ID NO: 42510 - DNA, 50 bp, Artificial Sequence; identical to SEQ ID NO: 272
  Probe

SEQ ID NO: 42511 - DNA, 50 bp, Artificial Sequence
  Probe
agcactctggactctgaatccagcgatccgagttcaagtctcggtggaac

SEQ ID NO: 42512 - DNA, 28 bp, Artificial Sequence
  Probe
agcactctggactttgaatccagcgatc

SEQ ID NO: 42513 - DNA, 29 bp, Artificial Sequence
  Probe
agcactctggactttgaatccagcgatcc

SEQ ID NO: 42514 - DNA, 30 bp, Artificial Sequence; identical to SEQ ID NO: 12674
  Probe

SEQ ID NO: 42515 - DNA, 31 bp, Artificial Sequence
  Probe
agcactctggactttgaatccagcgatccga

SEQ ID NO: 42516 - DNA, 50 bp, Artificial Sequence; identical to SEQ ID NO: 273
  Probe

SEQ ID NO: 42517 - DNA, 29 bp, Artificial Sequence
  Probe
agcagagtggcgcagcggaagcgtgctgg

SEQ ID NO: 42518 - DNA, 31 bp, Artificial Sequence; identical to SEQ ID NO: 275
  Probe

SEQ ID NO: 42519 - DNA, 32 bp, Artificial Sequence; identical to SEQ ID NO: 276
  Probe

SEQ ID NO: 42520 - DNA, 33 bp, Artificial Sequence; identical to SEQ ID NO: 277
  Probe

SEQ ID NO: 42521 - DNA, 34 bp, Artificial Sequence; identical to SEQ ID NO: 278
  Probe

SEQ ID NO: 42522 - DNA, 35 bp, Artificial Sequence; identical to SEQ ID NO: 279
  Probe

SEQ ID NO: 42523 - DNA, 36 bp, Artificial Sequence; identical to SEQ ID NO: 12682
  Probe

SEQ ID NO: 42524 - DNA, 29 bp, Artificial Sequence
  Probe
agcatagctgccttccaagcagttgaccc

SEQ ID NO: 42525 - DNA, 35 bp, Artificial Sequence; identical to SEQ ID NO: 280
  Probe

SEQ ID NO: 42526 - DNA, 36 bp, Artificial Sequence; identical to SEQ ID NO: 281
  Probe

SEQ ID NO: 42527 - DNA, 50 bp, Artificial Sequence; identical to SEQ ID NO: 285
  Probe

SEQ ID NO: 42528 - DNA, 35 bp, Artificial Sequence
  Probe
agccagggattgtgggttcgagtcccatctggggt

SEQ ID NO: 42529 - DNA, 36 bp, Artificial Sequence; identical to SEQ ID NO: 288
  Probe

SEQ ID NO: 42530 - DNA, 17 bp, Artificial Sequence
  Probe
agcccggtaatcgcata

SEQ ID NO: 42531 - DNA, 18 bp, Artificial Sequence
  Probe
agcccggtaatcgcataa

SEQ ID NO: 42532 - DNA, 24 bp, Artificial Sequence
  Probe
agcccggtaatcgcataaaactta

SEQ ID NO: 42533 - DNA, 29 bp, Artificial Sequence
  Probe
agcccggtaatcgcataaaacttaaaact

SEQ ID NO: 42534 - DNA, 34 bp, Artificial Sequence; identical to SEQ ID NO: 16437
  Probe

SEQ ID NO: 42535 - DNA, 37 bp, Artificial Sequence; identical to SEQ ID NO: 3291
  Probe

SEQ ID NO: 42536 - DNA, 38 bp, Artificial Sequence; identical to SEQ ID NO: 292
  Probe

SEQ ID NO: 42537 - DNA, 40 bp, Artificial Sequence; identical to SEQ ID NO: 3292
  Probe

SEQ ID NO: 42538 - DNA, 41 bp, Artificial Sequence; identical to SEQ ID NO: 16440
  Probe

SEQ ID NO: 42539 - DNA, 43 bp, Artificial Sequence
  Probe
agcccggtaatcgcataaaacttaaaactttacagtcagaggt

SEQ ID NO: 42540 - DNA, 46 bp, Artificial Sequence; identical to SEQ ID NO: 293
  Probe

SEQ ID NO: 42541 - DNA, 18 bp, Artificial Sequence
  Probe
agccctcagtaagttgca

SEQ ID NO: 42542 - DNA, 30 bp, Artificial Sequence; identical to SEQ ID NO: 297
  Probe

SEQ ID NO: 42543 - DNA, 31 bp, Artificial Sequence; identical to SEQ ID NO: 298
  Probe

SEQ ID NO: 42544 - DNA, 50 bp, Artificial Sequence; identical to SEQ ID NO: 3312
  Probe

SEQ ID NO: 42545 - DNA, 50 bp, Artificial Sequence; identical to SEQ ID NO: 3325
  Probe

SEQ ID NO: 42546 - DNA, 17 bp, Artificial Sequence
  Probe
agctcacaagaactgct

SEQ ID NO: 42547 - DNA, 23 bp, Artificial Sequence
  Probe
agctcacaagaactgctaactca

SEQ ID NO: 42548 - DNA, 36 bp, Artificial Sequence; identical to SEQ ID NO: 24978
  Probe

SEQ ID NO: 42549 - DNA, 50 bp, Artificial Sequence; identical to SEQ ID NO: 311
  Probe

SEQ ID NO: 42550 - DNA, 31 bp, Artificial Sequence; identical to SEQ ID NO: 315
  Probe

SEQ ID NO: 42551 - DNA, 34 bp, Artificial Sequence; identical to SEQ ID NO: 12717
  Probe

SEQ ID NO: 42552 - DNA, 22 bp, Artificial Sequence
  Probe
agctgttaactaagtgtttgtg

SEQ ID NO: 42553 - DNA, 41 bp, Artificial Sequence; identical to SEQ ID NO: 12718
  Probe

SEQ ID NO: 42554 - DNA, 42 bp, Artificial Sequence; identical to SEQ ID NO: 12719
  Probe

SEQ ID NO: 42555 - DNA, 43 bp, Artificial Sequence; identical to SEQ ID NO: 3377
  Probe

SEQ ID NO: 42556 - DNA, 33 bp, Artificial Sequence; identical to SEQ ID NO: 3396
  Probe

SEQ ID NO: 42557 - DNA, 33 bp, Artificial Sequence; identical to SEQ ID NO: 318
  Probe

SEQ ID NO: 42558 - DNA, 28 bp, Artificial Sequence
  Probe
aggatggggtgtgataggtggcacggag

SEQ ID NO: 42559 - DNA, 29 bp, Artificial Sequence
  Probe
aggattcggcgctctcaccgccgcggccc

SEQ ID NO: 42560 - DNA, 30 bp, Artificial Sequence; identical to SEQ ID NO: 16667
  Probe

SEQ ID NO: 42561 - DNA, 24 bp, Artificial Sequence
  Probe
aggccccgggttcgatccccggca

SEQ ID NO: 42562 - DNA, 30 bp, Artificial Sequence; identical to SEQ ID NO: 16670
  Probe

SEQ ID NO: 42563 - DNA, 31 bp, Artificial Sequence; identical to SEQ ID NO: 325
  Probe

SEQ ID NO: 42564 - DNA, 32 bp, Artificial Sequence; identical to SEQ ID NO: 326
  Probe

SEQ ID NO: 42565 - DNA, 22 bp, Artificial Sequence
  Probe
agggatgggttcgattctcata

SEQ ID NO: 42566 - DNA, 27 bp, Artificial Sequence
  Probe
agggatgggttcgattctcatagtcct

SEQ ID NO: 42567 - DNA, 29 bp, Artificial Sequence
  Probe
agggtccagggttcaagtccctgttcggg

SEQ ID NO: 42568 - DNA, 31 bp, Artificial Sequence; identical to SEQ ID NO: 38301
  Probe

SEQ ID NO: 42569 - DNA, 50 bp, Artificial Sequence; identical to SEQ ID NO: 334
  Probe

SEQ ID NO: 42570 - DNA, 30 bp, Artificial Sequence
  Probe
aggtcccgggttcgatccccagcatctcca

SEQ ID NO: 42571 - DNA, 30 bp, Artificial Sequence
  Probe
aggtccctggttcgatcccgggtttcggca

SEQ ID NO: 42572 - DNA, 30 bp, Artificial Sequence
  Probe
aggtcctgggttcgagccccagtggaacca

SEQ ID NO: 42573 - DNA, 28 bp, Artificial Sequence
  Probe
aggttggtggttcgagcccacccaggga

SEQ ID NO: 42574 - DNA, 30 bp, Artificial Sequence; identical to SEQ ID NO: 16821
  Probe

SEQ ID NO: 42575 - DNA, 31 bp, Artificial Sequence
  Probe
aggttggtggttcgagcccacccagggacgc

SEQ ID NO: 42576 - DNA, 26 bp, Artificial Sequence
  Probe
agtaaataataggagcttaaaccccc

SEQ ID NO: 42577 - DNA, 34 bp, Artificial Sequence; identical to SEQ ID NO: 3537
  Probe

SEQ ID NO: 42578 - DNA, 37 bp, Artificial Sequence; identical to SEQ ID NO: 3538
  Probe

SEQ ID NO: 42579 - DNA, 50 bp, Artificial Sequence; identical to SEQ ID NO: 337
  Probe

SEQ ID NO: 42580 - DNA, 16 bp, Artificial Sequence
  Probe
agtcggtagagcatca

SEQ ID NO: 42581 - DNA, 18 bp, Artificial Sequence
  Probe
agtcggtagagcatcaga

SEQ ID NO: 42582 - DNA, 19 bp, Artificial Sequence
  Probe
agtcggtagagcatcagac

SEQ ID NO: 42583 - DNA, 16 bp, Artificial Sequence
  Probe
agtcggtagagcatgg

SEQ ID NO: 42584 - DNA, 23 bp, Artificial Sequence
  Probe
agtctcataatctgaaggtcgtg

SEQ ID NO: 42585 - DNA, 36 bp, Artificial Sequence; identical to SEQ ID NO: 16942
  Probe

SEQ ID NO: 42586 - DNA, 36 bp, Artificial Sequence; identical to SEQ ID NO: 361
  Probe

SEQ ID NO: 42587 - DNA, 29 bp, Artificial Sequence
  Probe
agtgtttgtgggtttaagtcccattggtc

SEQ ID NO: 42588 - DNA, 30 bp, Artificial Sequence; identical to SEQ ID NO: 3599
  Probe

SEQ ID NO: 42589 - DNA, 31 bp, Artificial Sequence; identical to SEQ ID NO: 3600
  Probe

SEQ ID NO: 42590 - DNA, 22 bp, Artificial Sequence
  Probe
agttcaaatctcggtgggacct

SEQ ID NO: 42591 - DNA, 39 bp, Artificial Sequence
  Probe
agttgattagggtgcttagctgttaactaagtgtttgtg

SEQ ID NO: 42592 - DNA, 50 bp, Artificial Sequence; identical to SEQ ID NO: 365
  Probe

SEQ ID NO: 42593 - DNA, 30 bp, Artificial Sequence; identical to SEQ ID NO: 17102
  Probe

SEQ ID NO: 42594 - DNA, 32 bp, Artificial Sequence; identical to SEQ ID NO: 367
  Probe

SEQ ID NO: 42595 - DNA, 33 bp, Artificial Sequence; identical to SEQ ID NO: 368
  Probe

SEQ ID NO: 42596 - DNA, 36 bp, Artificial Sequence
  Probe
atagagtaaataataggagcttaaacccccttattt

SEQ ID NO: 42597 - DNA, 39 bp, Artificial Sequence; identical to SEQ ID NO: 371
  Probe

SEQ ID NO: 42598 - DNA, 16 bp, Artificial Sequence
  Probe
ataggagcttaaaccc

SEQ ID NO: 42599 - DNA, 36 bp, Artificial Sequence; identical to SEQ ID NO: 17131
  Probe

SEQ ID NO: 42600 - DNA, 24 bp, Artificial Sequence
  Probe
atatcattggtcgtggttgtagtc

SEQ ID NO: 42601 - DNA, 28 bp, Artificial Sequence
  Probe
atatcattggtcgtggttgtagtccgtg

SEQ ID NO: 42602 - DNA, 30 bp, Artificial Sequence; identical to SEQ ID NO: 3694
  Probe

SEQ ID NO: 42603 - DNA, 32 bp, Artificial Sequence; identical to SEQ ID NO: 17140
  Probe

SEQ ID NO: 42604 - DNA, 33 bp, Artificial Sequence; identical to SEQ ID NO: 12799
  Probe

SEQ ID NO: 42605 - DNA, 34 bp, Artificial Sequence; identical to SEQ ID NO: 12800
  Probe

SEQ ID NO: 42606 - DNA, 34 bp, Artificial Sequence; identical to SEQ ID NO: 12806
  Probe

SEQ ID NO: 42607 - DNA, 26 bp, Artificial Sequence
  Probe
atcattggtcgtggttgtagtccgtg

SEQ ID NO: 42608 - DNA, 30 bp, Artificial Sequence; identical to SEQ ID NO: 8552
  Probe

SEQ ID NO: 42609 - DNA, 35 bp, Artificial Sequence; identical to SEQ ID NO: 379
  Probe

SEQ ID NO: 42610 - DNA, 35 bp, Artificial Sequence; identical to SEQ ID NO: 380
  Probe

SEQ ID NO: 42611 - DNA, 21 bp, Artificial Sequence
  Probe
atccattggtcttaggcccca

SEQ ID NO: 42612 - DNA, 16 bp, Artificial Sequence
  Probe
atcccaccgctgccac

SEQ ID NO: 42613 - DNA, 19 bp, Artificial Sequence
  Probe
atccccggcacctccacca

SEQ ID NO: 42614 - DNA, 20 bp, Artificial Sequence
  Probe
atcgatgcccgcatcctcca

SEQ ID NO: 42615 - DNA, 28 bp, Artificial Sequence
  Probe
atcgcataaaacttaaaactttacagtc

SEQ ID NO: 42616 - DNA, 29 bp, Artificial Sequence
  Probe
atcgcataaaacttaaaactttacagtca

SEQ ID NO: 42617 - DNA, 31 bp, Artificial Sequence; identical to SEQ ID NO: 17315
  Probe

SEQ ID NO: 42618 - DNA, 32 bp, Artificial Sequence; identical to SEQ ID NO: 386
  Probe

SEQ ID NO: 42619 - DNA, 33 bp, Artificial Sequence; identical to SEQ ID NO: 387
  Probe

SEQ ID NO: 42620 - DNA, 22 bp, Artificial Sequence
  Probe
atctaaaggtccctggttcgat

SEQ ID NO: 42621 - DNA, 34 bp, Artificial Sequence; identical to SEQ ID NO: 36319
  Probe

SEQ ID NO: 42622 - DNA, 36 bp, Artificial Sequence; identical to SEQ ID NO: 393
  Probe

SEQ ID NO: 42623 - DNA, 37 bp, Artificial Sequence; identical to SEQ ID NO: 394
  Probe

SEQ ID NO: 42624 - DNA, 36 bp, Artificial Sequence; identical to SEQ ID NO: 17365
  Probe

SEQ ID NO: 42625 - DNA, 16 bp, Artificial Sequence
  Probe
atgcccgcatcctcca

SEQ ID NO: 42626 - DNA, 34 bp, Artificial Sequence; identical to SEQ ID NO: 17434
  Probe

SEQ ID NO: 42627 - DNA, 35 bp, Artificial Sequence
  Probe
atgccgaggttgtgagttcgagcctcacctggagc

SEQ ID NO: 42628 - DNA, 19 bp, Artificial Sequence
  Probe
atgtttagacgggctcaca

SEQ ID NO: 42629 - DNA, 20 bp, Artificial Sequence
  Probe
atgtttagacgggctcacat

SEQ ID NO: 42630 - DNA, 27 bp, Artificial Sequence
  Probe
atgtttagacgggctcacatcacccca

SEQ ID NO: 42631 - DNA, 19 bp, Artificial Sequence
  Probe
attggtcgtggttgtagtc

SEQ ID NO: 42632 - DNA, 20 bp, Artificial Sequence
  Probe
attggtcgtggttgtagtcc

SEQ ID NO: 42633 - DNA, 22 bp, Artificial Sequence
  Probe
attggtcgtggttgtagtccgt

SEQ ID NO: 42634 - DNA, 23 bp, Artificial Sequence
  Probe
attggtcgtggttgtagtccgtg

SEQ ID NO: 42635 - DNA, 24 bp, Artificial Sequence
  Probe
attggtcgtggttgtagtccgtgc

SEQ ID NO: 42636 - DNA, 25 bp, Artificial Sequence
  Probe
attggtcgtggttgtagtccgtgcg

SEQ ID NO: 42637 - DNA, 26 bp, Artificial Sequence
  Probe
attggtcgtggttgtagtccgtgcga

SEQ ID NO: 42638 - DNA, 27 bp, Artificial Sequence
  Probe
attggtcgtggttgtagtccgtgcgag

SEQ ID NO: 42639 - DNA, 28 bp, Artificial Sequence
  Probe
attggtcgtggttgtagtccgtgcgaga

SEQ ID NO: 42640 - DNA, 29 bp, Artificial Sequence
  Probe
attggtcgtggttgtagtccgtgcgagaa

SEQ ID NO: 42641 - DNA, 30 bp, Artificial Sequence; identical to SEQ ID NO: 9429
  Probe

SEQ ID NO: 42642 - DNA, 31 bp, Artificial Sequence; identical to SEQ ID NO: 426
  Probe

SEQ ID NO: 42643 - DNA, 32 bp, Artificial Sequence; identical to SEQ ID NO: 3924
  Probe

SEQ ID NO: 42644 - DNA, 33 bp, Artificial Sequence; identical to SEQ ID NO: 3925
  Probe

SEQ ID NO: 42645 - DNA, 42 bp, Artificial Sequence; identical to SEQ ID NO: 3929
  Probe

SEQ ID NO: 42646 - DNA, 44 bp, Artificial Sequence; identical to SEQ ID NO: 434
  Probe

SEQ ID NO: 42647 - DNA, 46 bp, Artificial Sequence; identical to SEQ ID NO: 436
  Probe

SEQ ID NO: 42648 - DNA, 50 bp, Artificial Sequence; identical to SEQ ID NO: 437
  Probe

SEQ ID NO: 42649 - DNA, 29 bp, Artificial Sequence
  Probe
caaagcaatacactgaaaatgtttagacg

SEQ ID NO: 42650 - DNA, 50 bp, Artificial Sequence; identical to SEQ ID NO: 442
  Probe

SEQ ID NO: 42651 - DNA, 37 bp, Artificial Sequence; identical to SEQ ID NO: 443
  Probe

SEQ ID NO: 42652 - DNA, 40 bp, Artificial Sequence
  Probe
caaagcacccaacttacacttaggagatttcaacttaact

SEQ ID NO: 42653 - DNA, 45 bp, Artificial Sequence
  Probe
caaagcacccaacttacacttaggagatttcaacttaacttgacc

SEQ ID NO: 42654 - DNA, 46 bp, Artificial Sequence; identical to SEQ ID NO: 446
  Probe

SEQ ID NO: 42655 - DNA, 49 bp, Artificial Sequence; identical to SEQ ID NO: 3987
  Probe

SEQ ID NO: 42656 - DNA, 50 bp, Artificial Sequence; identical to SEQ ID NO: 447
  Probe

SEQ ID NO: 42657 - DNA, 31 bp, Artificial Sequence; identical to SEQ ID NO: 12856
  Probe

SEQ ID NO: 42658 - DNA, 27 bp, Artificial Sequence
  Probe
caacctcggttcgaatccgagtcacgg

SEQ ID NO: 42659 - DNA, 20 bp, Artificial Sequence
  Probe
caatccccggcacctccacc

SEQ ID NO: 42660 - DNA, 21 bp, Artificial Sequence
  Probe
caatccccggcacctccacca

SEQ ID NO: 42661 - DNA, 50 bp, Artificial Sequence; identical to SEQ ID NO: 462
  Probe

SEQ ID NO: 42662 - DNA, 19 bp, Artificial Sequence
  Probe
cacaagaactgctaactca

SEQ ID NO: 42663 - DNA, 50 bp, Artificial Sequence; identical to SEQ ID NO: 466
  Probe

SEQ ID NO: 42664 - DNA, 38 bp, Artificial Sequence; identical to SEQ ID NO: 17769
  Probe

SEQ ID NO: 42665 - DNA, 36 bp, Artificial Sequence; identical to SEQ ID NO: 477
  Probe

SEQ ID NO: 42666 - DNA, 37 bp, Artificial Sequence; identical to SEQ ID NO: 478
  Probe

SEQ ID NO: 42667 - DNA, 32 bp, Artificial Sequence; identical to SEQ ID NO: 481
  Probe

SEQ ID NO: 42668 - DNA, 33 bp, Artificial Sequence; identical to SEQ ID NO: 482
  Probe

SEQ ID NO: 42669 - DNA, 34 bp, Artificial Sequence; identical to SEQ ID NO: 483
  Probe

SEQ ID NO: 42670 - DNA, 35 bp, Artificial Sequence; identical to SEQ ID NO: 484
  Probe

SEQ ID NO: 42671 - DNA, 36 bp, Artificial Sequence; identical to SEQ ID NO: 485
  Probe

SEQ ID NO: 42672 - DNA, 37 bp, Artificial Sequence; identical to SEQ ID NO: 486
  Probe

SEQ ID NO: 42673 - DNA, 27 bp, Artificial Sequence
  Probe
cactgtaaagctaacttagcattaacc

SEQ ID NO: 42674 - DNA, 28 bp, Artificial Sequence
  Probe
cactgtaaagctaacttagcattaacct

SEQ ID NO: 42675 - DNA, 30 bp, Artificial Sequence; identical to SEQ ID NO: 493
  Probe

SEQ ID NO: 42676 - DNA, 50 bp, Artificial Sequence; identical to SEQ ID NO: 502
  Probe

SEQ ID NO: 42677 - DNA, 32 bp, Artificial Sequence; identical to SEQ ID NO: 504
  Probe

SEQ ID NO: 42678 - DNA, 32 bp, Artificial Sequence; identical to SEQ ID NO: 505
  Probe

SEQ ID NO: 42679 - DNA, 32 bp, Artificial Sequence; identical to SEQ ID NO: 511
  Probe

SEQ ID NO: 42680 - DNA, 34 bp, Artificial Sequence; identical to SEQ ID NO: 17838
  Probe

SEQ ID NO: 42681 - DNA, 17 bp, Artificial Sequence
  Probe
cagaccaagagccttca

SEQ ID NO: 42682 - DNA, 36 bp, Artificial Sequence; identical to SEQ ID NO: 513
  Probe

SEQ ID NO: 42683 - DNA, 24 bp, Artificial Sequence
  Probe
cagagaatagtttaaattagaatc

SEQ ID NO: 42684 - DNA, 30 bp, Artificial Sequence; identical to SEQ ID NO: 519
  Probe

SEQ ID NO: 42685 - DNA, 32 bp, Artificial Sequence; identical to SEQ ID NO: 521
  Probe

SEQ ID NO: 42686 - DNA, 20 bp, Artificial Sequence
  Probe
cagagcccggtaatcgcata

SEQ ID NO: 42687 - DNA, 41 bp, Artificial Sequence
  Probe
cagagcccggtaatcgcataaaacttaaaactttacagtca

SEQ ID NO: 42688 - DNA, 43 bp, Artificial Sequence
  Probe
cagagcccggtaatcgcataaaacttaaaactttacagtcaga

SEQ ID NO: 42689 - DNA, 32 bp, Artificial Sequence; identical to SEQ ID NO: 530
  Probe

SEQ ID NO: 42690 - DNA, 32 bp, Artificial Sequence; identical to SEQ ID NO: 531
  Probe

SEQ ID NO: 42691 - DNA, 23 bp, Artificial Sequence
  Probe
cagggatgggttcgattctcata

SEQ ID NO: 42692 - DNA, 25 bp, Artificial Sequence
  Probe
cagggatgggttcgattctcatagt

SEQ ID NO: 42693 - DNA, 26 bp, Artificial Sequence
  Probe
cagggatgggttcgattctcatagtc

SEQ ID NO: 42694 - DNA, 27 bp, Artificial Sequence
  Probe
cagggatgggttcgattctcatagtcc

SEQ ID NO: 42695 - DNA, 28 bp, Artificial Sequence
  Probe
cagggatgggttcgattctcatagtcct

SEQ ID NO: 42696 - DNA, 30 bp, Artificial Sequence; identical to SEQ ID NO: 534
  Probe

SEQ ID NO: 42697 - DNA, 32 bp, Artificial Sequence; identical to SEQ ID NO: 4353
  Probe

SEQ ID NO: 42698 - DNA, 29 bp, Artificial Sequence
  Probe
cagttgatgcagagtggggttttgcagtc

SEQ ID NO: 42699 - DNA, 31 bp, Artificial Sequence; identical to SEQ ID NO: 18035
  Probe

SEQ ID NO: 42700 - DNA, 25 bp, Artificial Sequence
  Probe
catatcattggtcgtggttgtagtc

SEQ ID NO: 42701 - DNA, 29 bp, Artificial Sequence
  Probe
catatcattggtcgtggttgtagtccgtg

SEQ ID NO: 42702 - DNA, 31 bp, Artificial Sequence; identical to SEQ ID NO: 540
  Probe

SEQ ID NO: 42703 - DNA, 33 bp, Artificial Sequence; identical to SEQ ID NO: 18059
  Probe

SEQ ID NO: 42704 - DNA, 35 bp, Artificial Sequence; identical to SEQ ID NO: 18060
  Probe

SEQ ID NO: 42705 - DNA, 22 bp, Artificial Sequence
  Probe
cattcttgcgacccgggttcga

SEQ ID NO: 42706 - DNA, 23 bp, Artificial Sequence
  Probe
cattcttgcgacccgggttcgat

SEQ ID NO: 42707 - DNA, 24 bp, Artificial Sequence
  Probe
cattcttgcgacccgggttcgatt

SEQ ID NO: 42708 - DNA, 24 bp, Artificial Sequence
  Probe
cattggtcgtggttgtagtccgtg

SEQ ID NO: 42709 - DNA, 26 bp, Artificial Sequence
  Probe
cattggtcgtggttgtagtccgtgcg

SEQ ID NO: 42710 - DNA, 28 bp, Artificial Sequence
  Probe
cattggtcgtggttgtagtccgtgcgag

SEQ ID NO: 42711 - DNA, 29 bp, Artificial Sequence
  Probe
cattggtcgtggttgtagtccgtgcgaga

SEQ ID NO: 42712 - DNA, 30 bp, Artificial Sequence; identical to SEQ ID NO: 18130
  Probe

SEQ ID NO: 42713 - DNA, 32 bp, Artificial Sequence; identical to SEQ ID NO: 548
  Probe

SEQ ID NO: 42714 - DNA, 46 bp, Artificial Sequence; identical to SEQ ID NO: 558
  Probe

SEQ ID NO: 42715 - DNA, 34 bp, Artificial Sequence; identical to SEQ ID NO: 566
  Probe

SEQ ID NO: 42716 - DNA, 19 bp, Artificial Sequence
  Probe
ccacgcgggaggcccgggt

SEQ ID NO: 42717 - DNA, 33 bp, Artificial Sequence; identical to SEQ ID NO: 4551
  Probe

SEQ ID NO: 42718 - DNA, 33 bp, Artificial Sequence; identical to SEQ ID NO: 571
  Probe

SEQ ID NO: 42719 - DNA, 32 bp, Artificial Sequence; identical to SEQ ID NO: 36419
  Probe

SEQ ID NO: 42720 - DNA, 24 bp, Artificial Sequence
  Probe
ccagggttcaagtccctgttcggg

SEQ ID NO: 42721 - DNA, 26 bp, Artificial Sequence
  Probe
ccagggttcaagtccctgttcgggcg

SEQ ID NO: 42722 - DNA, 50 bp, Artificial Sequence; identical to SEQ ID NO: 4574
  Probe

SEQ ID NO: 42723 - DNA, 30 bp, Artificial Sequence; identical to SEQ ID NO: 9679
  Probe

SEQ ID NO: 42724 - DNA, 32 bp, Artificial Sequence; identical to SEQ ID NO: 580
  Probe

SEQ ID NO: 42725 - DNA, 33 bp, Artificial Sequence; identical to SEQ ID NO: 581
  Probe

SEQ ID NO: 42726 - DNA, 34 bp, Artificial Sequence; identical to SEQ ID NO: 582
  Probe

SEQ ID NO: 42727 - DNA, 37 bp, Artificial Sequence; identical to SEQ ID NO: 12944
  Probe

SEQ ID NO: 42728 - DNA, 40 bp, Artificial Sequence; identical to SEQ ID NO: 12945
  Probe

SEQ ID NO: 42729 - DNA, 32 bp, Artificial Sequence; identical to SEQ ID NO: 590
  Probe

SEQ ID NO: 42730 - DNA, 37 bp, Artificial Sequence; identical to SEQ ID NO: 599
  Probe

SEQ ID NO: 42731 - DNA, 39 bp, Artificial Sequence; identical to SEQ ID NO: 600
  Probe

SEQ ID NO: 42732 - DNA, 31 bp, Artificial Sequence; identical to SEQ ID NO: 602
  Probe

SEQ ID NO: 42733 - DNA, 32 bp, Artificial Sequence; identical to SEQ ID NO: 4701
  Probe

SEQ ID NO: 42734 - DNA, 33 bp, Artificial Sequence; identical to SEQ ID NO: 603
  Probe

SEQ ID NO: 42735 - DNA, 34 bp, Artificial Sequence; identical to SEQ ID NO: 604
  Probe

SEQ ID NO: 42736 - DNA, 17 bp, Artificial Sequence
  Probe
ccccggcacctccacca

SEQ ID NO: 42737 - DNA, 24 bp, Artificial Sequence
  Probe
ccccgggttcaatccccggcacct

SEQ ID NO: 42738 - DNA, 26 bp, Artificial Sequence
  Probe
ccccgggttcaatccccggcacctcc

SEQ ID NO: 42739 - DNA, 27 bp, Artificial Sequence
  Probe
ccccgggttcaatccccggcacctcca

SEQ ID NO: 42740 - DNA, 24 bp, Artificial Sequence
  Probe
ccccgggttcaatccccggcatct

SEQ ID NO: 42741 - DNA, 26 bp, Artificial Sequence
  Probe
ccccgggttcaatccccggcatctcc

SEQ ID NO: 42742 - DNA, 27 bp, Artificial Sequence
  Probe
ccccgggttcaatccccggcatctcca

SEQ ID NO: 42743 - DNA, 27 bp, Artificial Sequence
  Probe
ccccgggttcgacccccggctcctcca

SEQ ID NO: 42744 - DNA, 21 bp, Artificial Sequence
  Probe
ccccgggttcgatccccggca

SEQ ID NO: 42745 - DNA, 24 bp, Artificial Sequence
  Probe
ccccgggttcgatccccggcatct

SEQ ID NO: 42746 - DNA, 26 bp, Artificial Sequence
  Probe
ccccgggttcgatccccggcatctcc

SEQ ID NO: 42747 - DNA, 27 bp, Artificial Sequence
  Probe
ccccgggttcgatccccggcatctcca

SEQ ID NO: 42748 - DNA, 30 bp, Artificial Sequence; identical to SEQ ID NO: 611
  Probe

SEQ ID NO: 42749 - DNA, 31 bp, Artificial Sequence; identical to SEQ ID NO: 612
  Probe

SEQ ID NO: 42750 - DNA, 32 bp, Artificial Sequence; identical to SEQ ID NO: 613
  Probe

SEQ ID NO: 42751 - DNA, 30 bp, Artificial Sequence; identical to SEQ ID NO: 615
  Probe

SEQ ID NO: 42752 - DNA, 31 bp, Artificial Sequence; identical to SEQ ID NO: 616
  Probe

SEQ ID NO: 42753 - DNA, 32 bp, Artificial Sequence; identical to SEQ ID NO: 617
  Probe

SEQ ID NO: 42754 - DNA, 35 bp, Artificial Sequence; identical to SEQ ID NO: 620
  Probe

SEQ ID NO: 42755 - DNA, 30 bp, Artificial Sequence; identical to SEQ ID NO: 4748
  Probe

SEQ ID NO: 42756 - DNA, 31 bp, Artificial Sequence; identical to SEQ ID NO: 621
  Probe

SEQ ID NO: 42757 - DNA, 32 bp, Artificial Sequence; identical to SEQ ID NO: 622
  Probe

SEQ ID NO: 42758 - DNA, 30 bp, Artificial Sequence; identical to SEQ ID NO: 4750
  Probe

SEQ ID NO: 42759 - DNA, 31 bp, Artificial Sequence; identical to SEQ ID NO: 626
  Probe

SEQ ID NO: 42760 - DNA, 32 bp, Artificial Sequence; identical to SEQ ID NO: 627
  Probe

SEQ ID NO: 42761 - DNA, 26 bp, Artificial Sequence
  Probe
cccgggttcaaatcccggacgagccc

SEQ ID NO: 42762 - DNA, 27 bp, Artificial Sequence
  Probe
cccgggttcaaatcccggacgagcccc

SEQ ID NO: 42763 - DNA, 29 bp, Artificial Sequence
  Probe
cccgggttcaatccccggcacctccacca

SEQ ID NO: 42764 - DNA, 17 bp, Artificial Sequence
  Probe
cccgggttcgatcccca

SEQ ID NO: 42765 - DNA, 18 bp, Artificial Sequence
  Probe
cccgggttcgatccccag

SEQ ID NO: 42766 - DNA, 19 bp, Artificial Sequence
  Probe
cccgggttcgatccccagc

SEQ ID NO: 42767 - DNA, 20 bp, Artificial Sequence
  Probe
cccgggttcgatccccagca

SEQ ID NO: 42768 - DNA, 22 bp, Artificial Sequence
  Probe
cccgggttcgatccccagcatc

SEQ ID NO: 42769 - DNA, 23 bp, Artificial Sequence
  Probe
cccgggttcgatccccagcatct

SEQ ID NO: 42770 - DNA, 24 bp, Artificial Sequence
  Probe
cccgggttcgatccccagcatctc

SEQ ID NO: 42771 - DNA, 25 bp, Artificial Sequence
  Probe
cccgggttcgatccccagcatctcc

SEQ ID NO: 42772 - DNA, 26 bp, Artificial Sequence
  Probe
cccgggttcgatccccagcatctcca

SEQ ID NO: 42773 - DNA, 36 bp, Artificial Sequence; identical to SEQ ID NO: 4758
  Probe

SEQ ID NO: 42774 - DNA, 16 bp, Artificial Sequence
  Probe
ccctcagtaagttgca

SEQ ID NO: 42775 - DNA, 30 bp, Artificial Sequence; identical to SEQ ID NO: 637
  Probe

SEQ ID NO: 42776 - DNA, 31 bp, Artificial Sequence; identical to SEQ ID NO: 638
  Probe

SEQ ID NO: 42777 - DNA, 32 bp, Artificial Sequence; identical to SEQ ID NO: 639
  Probe

SEQ ID NO: 42778 - DNA, 33 bp, Artificial Sequence; identical to SEQ ID NO: 640
  Probe

SEQ ID NO: 42779 - DNA, 34 bp, Artificial Sequence; identical to SEQ ID NO: 641
  Probe

SEQ ID NO: 42780 - DNA, 35 bp, Artificial Sequence; identical to SEQ ID NO: 642
  Probe

SEQ ID NO: 42781 - DNA, 26 bp, Artificial Sequence
  Probe
ccctggttcaaatccgggtgccccct

SEQ ID NO: 42782 - DNA, 27 bp, Artificial Sequence
  Probe
ccctggttcaaatccgggtgccccctc

SEQ ID NO: 42783 - DNA, 24 bp, Artificial Sequence
  Probe
ccctggttcgatcccgggtttcgg

SEQ ID NO: 42784 - DNA, 25 bp, Artificial Sequence
  Probe
ccctggttcgatcccgggtttcggc

SEQ ID NO: 42785 - DNA, 26 bp, Artificial Sequence
  Probe
ccctggttcgatcccgggtttcggca

SEQ ID NO: 42786 - DNA, 27 bp, Artificial Sequence
  Probe
ccctggttcgatcccgggtttcggcac

SEQ ID NO: 42787 - DNA, 29 bp, Artificial Sequence
  Probe
ccgaaaatgttggttatacccttcccgta

SEQ ID NO: 42788 - DNA, 30 bp, Artificial Sequence; identical to SEQ ID NO: 644
  Probe

SEQ ID NO: 42789 - DNA, 31 bp, Artificial Sequence; identical to SEQ ID NO: 4782
  Probe

SEQ ID NO: 42790 - DNA, 32 bp, Artificial Sequence; identical to SEQ ID NO: 13002
  Probe

SEQ ID NO: 42791 - DNA, 33 bp, Artificial Sequence; identical to SEQ ID NO: 645
  Probe

SEQ ID NO: 42792 - DNA, 35 bp, Artificial Sequence; identical to SEQ ID NO: 646
  Probe

SEQ ID NO: 42793 - DNA, 36 bp, Artificial Sequence; identical to SEQ ID NO: 18606
  Probe

SEQ ID NO: 42794 - DNA, 33 bp, Artificial Sequence; identical to SEQ ID NO: 18608
  Probe

SEQ ID NO: 42795 - DNA, 35 bp, Artificial Sequence
  Probe
ccgaaaggttggtggttcgatcccacccagggacg

SEQ ID NO: 42796 - DNA, 33 bp, Artificial Sequence
  Probe
ccgaggttgtgagttcgagcctcacctggagca

SEQ ID NO: 42797 - DNA, 34 bp, Artificial Sequence; identical to SEQ ID NO: 13007
  Probe

SEQ ID NO: 42798 - DNA, 45 bp, Artificial Sequence
  Probe
ccgcctgtcacgcgggagaccggggttcgattccccgacggggag

SEQ ID NO: 42799 - DNA, 31 bp, Artificial Sequence; identical to SEQ ID NO: 658
  Probe

SEQ ID NO: 42800 - DNA, 32 bp, Artificial Sequence; identical to SEQ ID NO: 659
  Probe

SEQ ID NO: 42801 - DNA, 25 bp, Artificial Sequence
  Probe
ccggagatgaaaacctttttccaag

SEQ ID NO: 42802 - DNA, 27 bp, Artificial Sequence
  Probe
ccggagatgaaaacctttttccaagga

SEQ ID NO: 42803 - DNA, 29 bp, Artificial Sequence
  Probe
ccggagatgaaaacctttttccaaggaca

SEQ ID NO: 42804 - DNA, 29 bp, Artificial Sequence
  Probe
ccggatagctcagtcggtagagcatcaga

SEQ ID NO: 42805 - DNA, 29 bp, Artificial Sequence
  Probe
ccggctagctcagtcggtagagcatgaga

SEQ ID NO: 42806 - DNA, 30 bp, Artificial Sequence; identical to SEQ ID NO: 675
  Probe

SEQ ID NO: 42807 - DNA, 29 bp, Artificial Sequence
  Probe
ccggctagctcagtcggtagagcatggga

SEQ ID NO: 42808 - DNA, 30 bp, Artificial Sequence; identical to SEQ ID NO: 680
  Probe

SEQ ID NO: 42809 - DNA, 35 bp, Artificial Sequence; identical to SEQ ID NO: 4832
  Probe

SEQ ID NO: 42810 - DNA, 29 bp, Artificial Sequence
  Probe
ccgtgatcgtatagtggttagtactctgc

SEQ ID NO: 42811 - DNA, 35 bp, Artificial Sequence; identical to SEQ ID NO: 690
  Probe

SEQ ID NO: 42812 - DNA, 30 bp, Artificial Sequence; identical to SEQ ID NO: 4854
  Probe

SEQ ID NO: 42813 - DNA, 27 bp, Artificial Sequence
  Probe
cctcgggttcgatccccgacacctcca

SEQ ID NO: 42814 - DNA, 32 bp, Artificial Sequence; identical to SEQ ID NO: 4870
  Probe

SEQ ID NO: 42815 - DNA, 34 bp, Artificial Sequence; identical to SEQ ID NO: 694
  Probe

SEQ ID NO: 42816 - DNA, 35 bp, Artificial Sequence; identical to SEQ ID NO: 695
  Probe

SEQ ID NO: 42817 - DNA, 26 bp, Artificial Sequence
  Probe
cctgggttcgagccccagtggaacca

SEQ ID NO: 42818 - DNA, 29 bp, Artificial Sequence
  Probe
cctggtggtctagtggttaggattcggcg

SEQ ID NO: 42819 - DNA, 31 bp, Artificial Sequence; identical to SEQ ID NO: 700
  Probe

SEQ ID NO: 42820 - DNA, 32 bp, Artificial Sequence; identical to SEQ ID NO: 701
  Probe

SEQ ID NO: 42821 - DNA, 33 bp, Artificial Sequence; identical to SEQ ID NO: 702
  Probe

SEQ ID NO: 42822 - DNA, 34 bp, Artificial Sequence; identical to SEQ ID NO: 703
  Probe

SEQ ID NO: 42823 - DNA, 23 bp, Artificial Sequence
  Probe
cctgtcacgcgggagaccggggt

SEQ ID NO: 42824 - DNA, 24 bp, Artificial Sequence
  Probe
cctgtcacgcgggagaccggggtt

SEQ ID NO: 42825 - DNA, 39 bp, Artificial Sequence; identical to SEQ ID NO: 13082
  Probe

SEQ ID NO: 42826 - DNA, 41 bp, Artificial Sequence; identical to SEQ ID NO: 18829
  Probe

SEQ ID NO: 42827 - DNA, 42 bp, Artificial Sequence; identical to SEQ ID NO: 706
  Probe

SEQ ID NO: 42828 - DNA, 19 bp, Artificial Sequence
  Probe
ccttccaagcagttgaccc

SEQ ID NO: 42829 - DNA, 28 bp, Artificial Sequence
  Probe
cgaaaatgttggttatacccttcccgta

SEQ ID NO: 42830 - DNA, 29 bp, Artificial Sequence
  Probe
cgaaaatgttggttatacccttcccgtac

SEQ ID NO: 42831 - DNA, 30 bp, Artificial Sequence; identical to SEQ ID NO: 709
  Probe

SEQ ID NO: 42832 - DNA, 31 bp, Artificial Sequence; identical to SEQ ID NO: 710
  Probe

SEQ ID NO: 42833 - DNA, 32 bp, Artificial Sequence; identical to SEQ ID NO: 711
  Probe

SEQ ID NO: 42834 - DNA, 34 bp, Artificial Sequence; identical to SEQ ID NO: 18882
  Probe

SEQ ID NO: 42835 - DNA, 18 bp, Artificial Sequence
  Probe
cgaatccgagtcacggca

SEQ ID NO: 42836 - DNA, 19 bp, Artificial Sequence
  Probe
cgactcccggtgtgggaac

SEQ ID NO: 42837 - DNA, 18 bp, Artificial Sequence
  Probe
cgagcccacccagggacg

SEQ ID NO: 42838 - DNA, 20 bp, Artificial Sequence
  Probe
cgagcccacccagggacgcc

SEQ ID NO: 42839 - DNA, 18 bp, Artificial Sequence
  Probe
cgagcctcacctggagca

SEQ ID NO: 42840 - DNA, 32 bp, Artificial Sequence
  Probe
cgaggttgtgagttcgagcctcacctggagca

SEQ ID NO: 42841 - DNA, 18 bp, Artificial Sequence
  Probe
cgatccccggcatctcca

SEQ ID NO: 42842 - DNA, 18 bp, Artificial Sequence
  Probe
cgatgcccgcatcctcca

SEQ ID NO: 42843 - DNA, 34 bp, Artificial Sequence; identical to SEQ ID NO: 13095
  Probe

SEQ ID NO: 42844 - DNA, 35 bp, Artificial Sequence; identical to SEQ ID NO: 13096
  Probe

SEQ ID NO: 42845 - DNA, 36 bp, Artificial Sequence; identical to SEQ ID NO: 13097
  Probe

SEQ ID NO: 42846 - DNA, 26 bp, Artificial Sequence
  Probe
cgcataaaacttaaaactttacagtc

SEQ ID NO: 42847 - DNA, 27 bp, Artificial Sequence
  Probe
cgcataaaacttaaaactttacagtca

SEQ ID NO: 42848 - DNA, 29 bp, Artificial Sequence
  Probe
cgcataaaacttaaaactttacagtcaga

SEQ ID NO: 42849 - DNA, 33 bp, Artificial Sequence; identical to SEQ ID NO: 13103
  Probe

SEQ ID NO: 42850 - DNA, 28 bp, Artificial Sequence
  Probe
cgccgctggtgtagtggtatcatgcaag

SEQ ID NO: 42851 - DNA, 29 bp, Artificial Sequence
  Probe
cgccgctggtgtagtggtatcatgcaaga

SEQ ID NO: 42852 - DNA, 31 bp, Artificial Sequence; identical to SEQ ID NO: 722
  Probe

SEQ ID NO: 42853 - DNA, 41 bp, Artificial Sequence; identical to SEQ ID NO: 725
  Probe

SEQ ID NO: 42854 - DNA, 44 bp, Artificial Sequence; identical to SEQ ID NO: 5006
  Probe

SEQ ID NO: 42855 - DNA, 36 bp, Artificial Sequence; identical to SEQ ID NO: 19123
  Probe

SEQ ID NO: 42856 - DNA, 26 bp, Artificial Sequence
  Probe
cgcgagttcaaatctcgctggggcct

SEQ ID NO: 42857 - DNA, 30 bp, Artificial Sequence; identical to SEQ ID NO: 19131
  Probe

SEQ ID NO: 42858 - DNA, 31 bp, Artificial Sequence; identical to SEQ ID NO: 5024
  Probe

SEQ ID NO: 42859 - DNA, 32 bp, Artificial Sequence; identical to SEQ ID NO: 727
  Probe

SEQ ID NO: 42860 - DNA, 34 bp, Artificial Sequence; identical to SEQ ID NO: 728
  Probe

SEQ ID NO: 42861 - DNA, 35 bp, Artificial Sequence; identical to SEQ ID NO: 729
  Probe

SEQ ID NO: 42862 - DNA, 30 bp, Artificial Sequence; identical to SEQ ID NO: 730
  Probe

SEQ ID NO: 42863 - DNA, 31 bp, Artificial Sequence; identical to SEQ ID NO: 731
  Probe

SEQ ID NO: 42864 - DNA, 32 bp, Artificial Sequence; identical to SEQ ID NO: 732
  Probe

SEQ ID NO: 42865 - DNA, 33 bp, Artificial Sequence; identical to SEQ ID NO: 733
  Probe

SEQ ID NO: 42866 - DNA, 34 bp, Artificial Sequence; identical to SEQ ID NO: 734
  Probe

SEQ ID NO: 42867 - DNA, 35 bp, Artificial Sequence; identical to SEQ ID NO: 735
  Probe

SEQ ID NO: 42868 - DNA, 25 bp, Artificial Sequence
  Probe
cgctggttcgaatccggctcgaagg

SEQ ID NO: 42869 - DNA, 26 bp, Artificial Sequence
  Probe
cgctggttcgaatccggctcgaagga

SEQ ID NO: 42870 - DNA, 25 bp, Artificial Sequence
  Probe
cgctggttcgattccggctcgaagg

SEQ ID NO: 42871 - DNA, 26 bp, Artificial Sequence
  Probe
cgctggttcgattccggctcgaagga

SEQ ID NO: 42872 - DNA, 27 bp, Artificial Sequence
  Probe
cgctggttcgattccggctcgaaggac

SEQ ID NO: 42873 - DNA, 17 bp, Artificial Sequence
  Probe
cggaagcgtgctgggcc

SEQ ID NO: 42874 - DNA, 18 bp, Artificial Sequence
  Probe
cggaagcgtgctgggccc

SEQ ID NO: 42875 - DNA, 25 bp, Artificial Sequence
  Probe
cggaagcgtgctgggcccataaccc

SEQ ID NO: 42876 - DNA, 34 bp, Artificial Sequence; identical to SEQ ID NO: 747
  Probe

SEQ ID NO: 42877 - DNA, 36 bp, Artificial Sequence; identical to SEQ ID NO: 749
  Probe

SEQ ID NO: 42878 - DNA, 37 bp, Artificial Sequence; identical to SEQ ID NO: 750
  Probe

SEQ ID NO: 42879 - DNA, 38 bp, Artificial Sequence; identical to SEQ ID NO: 751
  Probe

SEQ ID NO: 42880 - DNA, 16 bp, Artificial Sequence
  Probe
cggagatgaaaacctt

SEQ ID NO: 42881 - DNA, 18 bp, Artificial Sequence
  Probe
cggagatgaaaacctttt

SEQ ID NO: 42882 - DNA, 26 bp, Artificial Sequence
  Probe
cggagatgaaaacctttttccaagga

SEQ ID NO: 42883 - DNA, 28 bp, Artificial Sequence
  Probe
cggagatgaaaacctttttccaaggaca

SEQ ID NO: 42884 - DNA, 28 bp, Artificial Sequence
  Probe
cggatagctcagtcggtagagcatcaga

SEQ ID NO: 42885 - DNA, 28 bp, Artificial Sequence
  Probe
cggcccgggttcgactcccggtgtggga

SEQ ID NO: 42886 - DNA, 29 bp, Artificial Sequence
  Probe
cggcccgggttcgactcccggtgtgggaa

SEQ ID NO: 42887 - DNA, 28 bp, Artificial Sequence
  Probe
cggcccgggttcgattcccggtcaggga

SEQ ID NO: 42888 - DNA, 29 bp, Artificial Sequence
  Probe
cggcccgggttcgattcccggtcagggaa

SEQ ID NO: 42889 - DNA, 28 bp, Artificial Sequence
  Probe
cggctagctcagtcggtagagcatgaga

SEQ ID NO: 42890 - DNA, 29 bp, Artificial Sequence
  Probe
cggctagctcagtcggtagagcatgagac

SEQ ID NO: 42891 - DNA, 28 bp, Artificial Sequence
  Probe
cggctagctcagtcggtagagcatggga

SEQ ID NO: 42892 - DNA, 29 bp, Artificial Sequence
  Probe
cggctagctcagtcggtagagcatgggac

SEQ ID NO: 42893 - DNA, 30 bp, Artificial Sequence; identical to SEQ ID NO: 778
  Probe

SEQ ID NO: 42894 - DNA, 32 bp, Artificial Sequence; identical to SEQ ID NO: 780
  Probe

SEQ ID NO: 42895 - DNA, 43 bp, Artificial Sequence
  Probe
cggctgttaaccgaaaggttggtggttcgagcccacccaggga

SEQ ID NO: 42896 - DNA, 45 bp, Artificial Sequence
  Probe
cggctgttaaccgaaaggttggtggttcgagcccacccagggacg

SEQ ID NO: 42897 - DNA, 30 bp, Artificial Sequence; identical to SEQ ID NO: 13204
  Probe

SEQ ID NO: 42898 - DNA, 32 bp, Artificial Sequence; identical to SEQ ID NO: 783
  Probe

SEQ ID NO: 42899 - DNA, 33 bp, Artificial Sequence; identical to SEQ ID NO: 784
  Probe

SEQ ID NO: 42900 - DNA, 30 bp, Artificial Sequence; identical to SEQ ID NO: 786
  Probe

SEQ ID NO: 42901 - DNA, 31 bp, Artificial Sequence; identical to SEQ ID NO: 787
  Probe

SEQ ID NO: 42902 - DNA, 32 bp, Artificial Sequence; identical to SEQ ID NO: 788
  Probe

SEQ ID NO: 42903 - DNA, 33 bp, Artificial Sequence; identical to SEQ ID NO: 789
  Probe

SEQ ID NO: 42904 - DNA, 27 bp, Artificial Sequence
  Probe
cgggttcaatccccggcacctccacca

SEQ ID NO: 42905 - DNA, 34 bp, Artificial Sequence; identical to SEQ ID NO: 790
  Probe

SEQ ID NO: 42906 - DNA, 36 bp, Artificial Sequence; identical to SEQ ID NO: 19325
  Probe

SEQ ID NO: 42907 - DNA, 50 bp, Artificial Sequence; identical to SEQ ID NO: 791
  Probe

SEQ ID NO: 42908 - DNA, 16 bp, Artificial Sequence
  Probe
cggtagagcatcagac

SEQ ID NO: 42909 - DNA, 50 bp, Artificial Sequence
  Probe
cggtagagcatgagactcttaatctcagggtcgtgggttcgagccccacg

SEQ ID NO: 42910 - DNA, 50 bp, Artificial Sequence
  Probe
cggtagagcatgggactcttaatcccagggtcgtgggttcgagccccacg

SEQ ID NO: 42911 - DNA, 26 bp, Artificial Sequence
  Probe
cgtgagttcgagcctcacacggggca

SEQ ID NO: 42912 - DNA, 26 bp, Artificial Sequence
  Probe
cgtgagttcgatcctcacacggggca

SEQ ID NO: 42913 - DNA, 19 bp, Artificial Sequence
  Probe
cgtggttgtagtccgtgcg

SEQ ID NO: 42914 - DNA, 21 bp, Artificial Sequence
  Probe
cgtggttgtagtccgtgcgag

SEQ ID NO: 42915 - DNA, 32 bp, Artificial Sequence; identical to SEQ ID NO: 5170
  Probe

SEQ ID NO: 42916 - DNA, 33 bp, Artificial Sequence; identical to SEQ ID NO: 5171
  Probe

SEQ ID NO: 42917 - DNA, 34 bp, Artificial Sequence; identical to SEQ ID NO: 13235
  Probe

SEQ ID NO: 42918 - DNA, 18 bp, Artificial Sequence
  Probe
ctaatggataaggcattg

SEQ ID NO: 42919 - DNA, 22 bp, Artificial Sequence
  Probe
ctagtggttaggattcggcgct

SEQ ID NO: 42920 - DNA, 21 bp, Artificial Sequence
  Probe
ctcacaagaactgctaactca

SEQ ID NO: 42921 - DNA, 25 bp, Artificial Sequence
  Probe
ctcacaagaactgctaactcatgcc

SEQ ID NO: 42922 - DNA, 50 bp, Artificial Sequence; identical to SEQ ID NO: 813
  Probe

SEQ ID NO: 42923 - DNA, 25 bp, Artificial Sequence
  Probe
ctcagggatgggttcgattctcata

SEQ ID NO: 42924 - DNA, 30 bp, Artificial Sequence; identical to SEQ ID NO: 13248
  Probe

SEQ ID NO: 42925 - DNA, 32 bp, Artificial Sequence; identical to SEQ ID NO: 5222
  Probe

SEQ ID NO: 42926 - DNA, 34 bp, Artificial Sequence
  Probe
ctcagggtcgtgggttcgagccccacgttgggcg

SEQ ID NO: 42927 - DNA, 34 bp, Artificial Sequence; identical to SEQ ID NO: 5286
  Probe

SEQ ID NO: 42928 - DNA, 33 bp, Artificial Sequence; identical to SEQ ID NO: 836
  Probe

SEQ ID NO: 42929 - DNA, 32 bp, Artificial Sequence; identical to SEQ ID NO: 5303
  Probe

SEQ ID NO: 42930 - DNA, 24 bp, Artificial Sequence
  Probe
ctgcgtgttcgaatcacgtcgggg

SEQ ID NO: 42931 - DNA, 25 bp, Artificial Sequence
  Probe
ctgcgtgttcgaatcacgtcggggt

SEQ ID NO: 42932 - DNA, 26 bp, Artificial Sequence
  Probe
ctgcgtgttcgaatcacgtcggggtc

SEQ ID NO: 42933 - DNA, 32 bp, Artificial Sequence; identical to SEQ ID NO: 5327
  Probe

SEQ ID NO: 42934 - DNA, 34 bp, Artificial Sequence
  Probe
ctggggattgtgggttcgagtcccatctgggtcg

SEQ ID NO: 42935 - DNA, 22 bp, Artificial Sequence
  Probe
ctgtcacgcgggagaccggggt

SEQ ID NO: 42936 - DNA, 23 bp, Artificial Sequence
  Probe
ctgtcacgcgggagaccggggtt

SEQ ID NO: 42937 - DNA, 36 bp, Artificial Sequence; identical to SEQ ID NO: 19676
  Probe

SEQ ID NO: 42938 - DNA, 39 bp, Artificial Sequence; identical to SEQ ID NO: 13295
  Probe

SEQ ID NO: 42939 - DNA, 40 bp, Artificial Sequence
  Probe
ctgtcacgcgggagaccggggttcgattccccgacgggga

SEQ ID NO: 42940 - DNA, 41 bp, Artificial Sequence; identical to SEQ ID NO: 36683
  Probe

SEQ ID NO: 42941 - DNA, 39 bp, Artificial Sequence; identical to SEQ ID NO: 19691
  Probe

SEQ ID NO: 42942 - DNA, 40 bp, Artificial Sequence; identical to SEQ ID NO: 19692
  Probe

SEQ ID NO: 42943 - DNA, 20 bp, Artificial Sequence
  Probe
cttacctcctcaaagcaata

SEQ ID NO: 42944 - DNA, 18 bp, Artificial Sequence
  Probe
cttccaagcagttgaccc

SEQ ID NO: 42945 - DNA, 18 bp, Artificial Sequence
  Probe
gaaaaagtcatggaggcc

SEQ ID NO: 42946 - DNA, 19 bp, Artificial Sequence
  Probe
gaaaaagtcatggaggcca

SEQ ID NO: 42947 - DNA, 27 bp, Artificial Sequence
  Probe
gaaaaagtcatggaggccatggggttg

SEQ ID NO: 42948 - DNA, 27 bp, Artificial Sequence
  Probe
gaaaatgttggttatacccttcccgta

SEQ ID NO: 42949 - DNA, 31 bp, Artificial Sequence; identical to SEQ ID NO: 862
  Probe

SEQ ID NO: 42950 - DNA, 32 bp, Artificial Sequence; identical to SEQ ID NO: 863
  Probe

SEQ ID NO: 42951 - DNA, 31 bp, Artificial Sequence; identical to SEQ ID NO: 880
  Probe

SEQ ID NO: 42952 - DNA, 33 bp, Artificial Sequence; identical to SEQ ID NO: 19832
  Probe

SEQ ID NO: 42953 - DNA, 45 bp, Artificial Sequence; identical to SEQ ID NO: 19841
  Probe

SEQ ID NO: 42954 - DNA, 30 bp, Artificial Sequence; identical to SEQ ID NO: 882
  Probe

SEQ ID NO: 42955 - DNA, 30 bp, Artificial Sequence; identical to SEQ ID NO: 883
  Probe

SEQ ID NO: 42956 - DNA, 30 bp, Artificial Sequence; identical to SEQ ID NO: 890
  Probe

SEQ ID NO: 42957 - DNA, 32 bp, Artificial Sequence; identical to SEQ ID NO: 5489
  Probe

SEQ ID NO: 42958 - DNA, 30 bp, Artificial Sequence; identical to SEQ ID NO: 5491
  Probe

SEQ ID NO: 42959 - DNA, 32 bp, Artificial Sequence; identical to SEQ ID NO: 5511
  Probe

SEQ ID NO: 42960 - DNA, 32 bp, Artificial Sequence
  Probe
gaaggtcgtgagttcgatcctcacacggggca

SEQ ID NO: 42961 - DNA, 37 bp, Artificial Sequence; identical to SEQ ID NO: 897
  Probe

SEQ ID NO: 42962 - DNA, 17 bp, Artificial Sequence
  Probe
gaatccgagtcacggca

SEQ ID NO: 42963 - DNA, 17 bp, Artificial Sequence
  Probe
gaatccggctcgaagga

SEQ ID NO: 42964 - DNA, 37 bp, Artificial Sequence; identical to SEQ ID NO: 901
  Probe

SEQ ID NO: 42965 - DNA, 17 bp, Artificial Sequence
  Probe
gacaacagaggcttacg

SEQ ID NO: 42966 - DNA, 18 bp, Artificial Sequence
  Probe
gacaacagaggcttacga

SEQ ID NO: 42967 - DNA, 20 bp, Artificial Sequence
  Probe
gacaacagaggcttacgacc

SEQ ID NO: 42968 - DNA, 21 bp, Artificial Sequence
  Probe
gacaacagaggcttacgaccc

SEQ ID NO: 42969 - DNA, 22 bp, Artificial Sequence
  Probe
gacaacagaggcttacgacccc

SEQ ID NO: 42970 - DNA, 25 bp, Artificial Sequence
  Probe
gacaacagaggcttacgacccctta

SEQ ID NO: 42971 - DNA, 27 bp, Artificial Sequence
  Probe
gacaacagaggcttacgaccccttatt

SEQ ID NO: 42972 - DNA, 30 bp, Artificial Sequence; identical to SEQ ID NO: 5550
  Probe

SEQ ID NO: 42973 - DNA, 31 bp, Artificial Sequence; identical to SEQ ID NO: 903
  Probe

SEQ ID NO: 42974 - DNA, 18 bp, Artificial Sequence
  Probe
gacaacattcaaaaaaga

SEQ ID NO: 42975 - DNA, 30 bp, Artificial Sequence; identical to SEQ ID NO: 8599
  Probe

SEQ ID NO: 42976 - DNA, 31 bp, Artificial Sequence; identical to SEQ ID NO: 904
  Probe

SEQ ID NO: 42977 - DNA, 32 bp, Artificial Sequence; identical to SEQ ID NO: 905
  Probe

SEQ ID NO: 42978 - DNA, 33 bp, Artificial Sequence; identical to SEQ ID NO: 906
  Probe

SEQ ID NO: 42979 - DNA, 34 bp, Artificial Sequence; identical to SEQ ID NO: 907
  Probe

SEQ ID NO: 42980 - DNA, 35 bp, Artificial Sequence; identical to SEQ ID NO: 908
  Probe

SEQ ID NO: 42981 - DNA, 36 bp, Artificial Sequence; identical to SEQ ID NO: 909
  Probe

SEQ ID NO: 42982 - DNA, 26 bp, Artificial Sequence
  Probe
gacccgggttcgattcccggccaacg

SEQ ID NO: 42983 - DNA, 27 bp, Artificial Sequence
  Probe
gacccgggttcgattcccggccaacgc

SEQ ID NO: 42984 - DNA, 28 bp, Artificial Sequence
  Probe
gacccgggttcgattcccggccaacgca

SEQ ID NO: 42985 - DNA, 33 bp, Artificial Sequence; identical to SEQ ID NO: 31329
  Probe

SEQ ID NO: 42986 - DNA, 27 bp, Artificial Sequence
  Probe
gaccggggttcaattccccgacgggga

SEQ ID NO: 42987 - DNA, 28 bp, Artificial Sequence
  Probe
gaccggggttcaattccccgacggggag

SEQ ID NO: 42988 - DNA, 26 bp, Artificial Sequence
  Probe
gaccggggttcgattccccgacgggg

SEQ ID NO: 42989 - DNA, 27 bp, Artificial Sequence
  Probe
gaccggggttcgattccccgacgggga

SEQ ID NO: 42990 - DNA, 28 bp, Artificial Sequence
  Probe
gaccggggttcgattccccgacggggag

SEQ ID NO: 42991 - DNA, 32 bp, Artificial Sequence; identical to SEQ ID NO: 31335
  Probe

SEQ ID NO: 42992 - DNA, 30 bp, Artificial Sequence
  Probe
gacctcgtggcgcaatggtagcgcgtctga

SEQ ID NO: 42993 - DNA, 32 bp, Artificial Sequence
  Probe
gacctcgtggcgcaatggtagcgcgtctgact

SEQ ID NO: 42994 - DNA, 33 bp, Artificial Sequence; identical to SEQ ID NO: 20085
  Probe

SEQ ID NO: 42995 - DNA, 34 bp, Artificial Sequence; identical to SEQ ID NO: 20086
  Probe

SEQ ID NO: 42996 - DNA, 18 bp, Artificial Sequence
  Probe
gagaaagctcacaagaac

SEQ ID NO: 42997 - DNA, 19 bp, Artificial Sequence
  Probe
gagaaagctcacaagaact

SEQ ID NO: 42998 - DNA, 20 bp, Artificial Sequence
  Probe
gagaaagctcacaagaactg

SEQ ID NO: 42999 - DNA, 21 bp, Artificial Sequence
  Probe
gagaaagctcacaagaactgc

SEQ ID NO: 43000 - DNA, 22 bp, Artificial Sequence
  Probe
gagaaagctcacaagaactgct

SEQ ID NO: 43001 - DNA, 23 bp, Artificial Sequence
  Probe
gagaaagctcacaagaactgcta

SEQ ID NO: 43002 - DNA, 25 bp, Artificial Sequence
  Probe
gagaaagctcacaagaactgctaac

SEQ ID NO: 43003 - DNA, 26 bp, Artificial Sequence
  Probe
gagaaagctcacaagaactgctaact

SEQ ID NO: 43004 - DNA, 27 bp, Artificial Sequence
  Probe
gagaaagctcacaagaactgctaactc

SEQ ID NO: 43005 - DNA, 28 bp, Artificial Sequence
  Probe
gagaaagctcacaagaactgctaactca

SEQ ID NO: 43006 - DNA, 29 bp, Artificial Sequence
  Probe
gagaaagctcacaagaactgctaactcat

SEQ ID NO: 43007 - DNA, 30 bp, Artificial Sequence; identical to SEQ ID NO: 932
  Probe

SEQ ID NO: 43008 - DNA, 31 bp, Artificial Sequence; identical to SEQ ID NO: 933
  Probe

SEQ ID NO: 43009 - DNA, 32 bp, Artificial Sequence; identical to SEQ ID NO: 934
  Probe

SEQ ID NO: 43010 - DNA, 35 bp, Artificial Sequence; identical to SEQ ID NO: 937
  Probe

SEQ ID NO: 43011 - DNA, 36 bp, Artificial Sequence; identical to SEQ ID NO: 938
  Probe

SEQ ID NO: 43012 - DNA, 38 bp, Artificial Sequence; identical to SEQ ID NO: 940
  Probe

SEQ ID NO: 43013 - DNA, 39 bp, Artificial Sequence; identical to SEQ ID NO: 941
  Probe

SEQ ID NO: 43014 - DNA, 40 bp, Artificial Sequence; identical to SEQ ID NO: 942
  Probe

SEQ ID NO: 43015 - DNA, 41 bp, Artificial Sequence; identical to SEQ ID NO: 943
  Probe

SEQ ID NO: 43016 - DNA, 42 bp, Artificial Sequence; identical to SEQ ID NO: 944
  Probe

SEQ ID NO: 43017 - DNA, 43 bp, Artificial Sequence; identical to SEQ ID NO: 945
  Probe

SEQ ID NO: 43018 - DNA, 44 bp, Artificial Sequence; identical to SEQ ID NO: 946
  Probe

SEQ ID NO: 43019 - DNA, 45 bp, Artificial Sequence; identical to SEQ ID NO: 947
  Probe

SEQ ID NO: 43020 - DNA, 49 bp, Artificial Sequence; identical to SEQ ID NO: 949
  Probe

SEQ ID NO: 43021 - DNA, 50 bp, Artificial Sequence; identical to SEQ ID NO: 950
  Probe

SEQ ID NO: 43022 - DNA, 24 bp, Artificial Sequence
  Probe
gagaccggggttcaattccccgac

SEQ ID NO: 43023 - DNA, 29 bp, Artificial Sequence
  Probe
gagaccggggttcaattccccgacgggga

SEQ ID NO: 43024 - DNA, 30 bp, Artificial Sequence; identical to SEQ ID NO: 20160
  Probe

SEQ ID NO: 43025 - DNA, 24 bp, Artificial Sequence
  Probe
gagaccggggttcgattccccgac

SEQ ID NO: 43026 - DNA, 28 bp, Artificial Sequence
  Probe
gagaccggggttcgattccccgacgggg

SEQ ID NO: 43027 - DNA, 29 bp, Artificial Sequence
  Probe
gagaccggggttcgattccccgacgggga

SEQ ID NO: 43028 - DNA, 30 bp, Artificial Sequence; identical to SEQ ID NO: 957
  Probe

SEQ ID NO: 43029 - DNA, 31 bp, Artificial Sequence
  Probe
gagatcctgggttcgaatcccagcggggcct

SEQ ID NO: 43030 - DNA, 31 bp, Artificial Sequence; identical to SEQ ID NO: 5648
  Probe

SEQ ID NO: 43031 - DNA, 32 bp, Artificial Sequence; identical to SEQ ID NO: 13399
  Probe

SEQ ID NO: 43032 - DNA, 17 bp, Artificial Sequence
  Probe
gagccccagtggaacca

SEQ ID NO: 43033 - DNA, 16 bp, Artificial Sequence
  Probe
gagcccggtaatcgca

SEQ ID NO: 43034 - DNA, 18 bp, Artificial Sequence
  Probe
gagcccggtaatcgcata

SEQ ID NO: 43035 - DNA, 19 bp, Artificial Sequence
  Probe
gagcccggtaatcgcataa

SEQ ID NO: 43036 - DNA, 25 bp, Artificial Sequence
  Probe
gagcccggtaatcgcataaaactta

SEQ ID NO: 43037 - DNA, 26 bp, Artificial Sequence
  Probe
gagcccggtaatcgcataaaacttaa

SEQ ID NO: 43038 - DNA, 30 bp, Artificial Sequence; identical to SEQ ID NO: 960
  Probe

SEQ ID NO: 43039 - DNA, 35 bp, Artificial Sequence; identical to SEQ ID NO: 5659
  Probe

SEQ ID NO: 43040 - DNA, 38 bp, Artificial Sequence; identical to SEQ ID NO: 962
  Probe

SEQ ID NO: 43041 - DNA, 39 bp, Artificial Sequence; identical to SEQ ID NO: 963
  Probe

SEQ ID NO: 43042 - DNA, 40 bp, Artificial Sequence
  Probe
gagcccggtaatcgcataaaacttaaaactttacagtcag

SEQ ID NO: 43043 - DNA, 41 bp, Artificial Sequence; identical to SEQ ID NO: 20258
  Probe

SEQ ID NO: 43044 - DNA, 42 bp, Artificial Sequence; identical to SEQ ID NO: 13408
  Probe

SEQ ID NO: 43045 - DNA, 43 bp, Artificial Sequence; identical to SEQ ID NO: 20259
  Probe

SEQ ID NO: 43046 - DNA, 44 bp, Artificial Sequence; identical to SEQ ID NO: 5660
  Probe

SEQ ID NO: 43047 - DNA, 45 bp, Artificial Sequence; identical to SEQ ID NO: 964
  Probe

SEQ ID NO: 43048 - DNA, 50 bp, Artificial Sequence; identical to SEQ ID NO: 965
  Probe

SEQ ID NO: 43049 - DNA, 17 bp, Artificial Sequence
  Probe
gagcctcacctggagca

SEQ ID NO: 43050 - DNA, 22 bp, Artificial Sequence
  Probe
gagcttaaacccccttatttct

SEQ ID NO: 43051 - DNA, 31 bp, Artificial Sequence
  Probe
gaggttgtgagttcgatcctcacctggagca

SEQ ID NO: 43052 - DNA, 26 bp, Artificial Sequence
  Probe
gagtaaataataggagcttaaacccc

SEQ ID NO: 43053 - DNA, 27 bp, Artificial Sequence
  Probe
gagtaaataataggagcttaaaccccc

SEQ ID NO: 43054 - DNA, 28 bp, Artificial Sequence
  Probe
gagtaaataataggagcttaaaccccct

SEQ ID NO: 43055 - DNA, 29 bp, Artificial Sequence
  Probe
gagtaaataataggagcttaaaccccctt

SEQ ID NO: 43056 - DNA, 30 bp, Artificial Sequence; identical to SEQ ID NO: 969
  Probe

SEQ ID NO: 43057 - DNA, 35 bp, Artificial Sequence; identical to SEQ ID NO: 971
  Probe

SEQ ID NO: 43058 - DNA, 36 bp, Artificial Sequence; identical to SEQ ID NO: 972
  Probe

SEQ ID NO: 43059 - DNA, 16 bp, Artificial Sequence
  Probe
gagtatccccgcctgt

SEQ ID NO: 43060 - DNA, 18 bp, Artificial Sequence
  Probe
gagtggggttttgcagtc

SEQ ID NO: 43061 - DNA, 21 bp, Artificial Sequence
  Probe
gataacagctatccattggtc

SEQ ID NO: 43062 - DNA, 31 bp, Artificial Sequence; identical to SEQ ID NO: 20382
  Probe

SEQ ID NO: 43063 - DNA, 32 bp, Artificial Sequence; identical to SEQ ID NO: 5709
  Probe

SEQ ID NO: 43064 - DNA, 17 bp, Artificial Sequence
  Probe
gataggtggcacggaga

SEQ ID NO: 43065 - DNA, 17 bp, Artificial Sequence
  Probe
gatcccgggtttcggca

SEQ ID NO: 43066 - DNA, 21 bp, Artificial Sequence
  Probe
gatcgatgcccgcatcctcca

SEQ ID NO: 43067 - DNA, 20 bp, Artificial Sequence
  Probe
gatgcagagtggggttttgc

SEQ ID NO: 43068 - DNA, 21 bp, Artificial Sequence
  Probe
gatgcagagtggggttttgca

SEQ ID NO: 43069 - DNA, 24 bp, Artificial Sequence
  Probe
gatgcagagtggggttttgcagtc

SEQ ID NO: 43070 - DNA, 26 bp, Artificial Sequence
  Probe
gatggggtgtgataggtggcacggag

SEQ ID NO: 43071 - DNA, 27 bp, Artificial Sequence
  Probe
gattctaggttcgactcctggctggct

SEQ ID NO: 43072 - DNA, 27 bp, Artificial Sequence
  Probe
gattgagggttcgagtcccttcgtggt

SEQ ID NO: 43073 - DNA, 27 bp, Artificial Sequence
  Probe
gattgcaggttcgagtcctgccgcggt

SEQ ID NO: 43074 - DNA, 27 bp, Artificial Sequence
  Probe
gattgtgaatctgacaacagaggctta

SEQ ID NO: 43075 - DNA, 28 bp, Artificial Sequence
  Probe
gattgtgaatctgacaacagaggcttac

SEQ ID NO: 43076 - DNA, 29 bp, Artificial Sequence
  Probe
gattgtgaatctgacaacagaggcttacg

SEQ ID NO: 43077 - DNA, 30 bp, Artificial Sequence; identical to SEQ ID NO: 20455
  Probe

SEQ ID NO: 43078 - DNA, 32 bp, Artificial Sequence; identical to SEQ ID NO: 5751
  Probe

SEQ ID NO: 43079 - DNA, 33 bp, Artificial Sequence; identical to SEQ ID NO: 982
  Probe

SEQ ID NO: 43080 - DNA, 34 bp, Artificial Sequence; identical to SEQ ID NO: 983
  Probe

SEQ ID NO: 43081 - DNA, 37 bp, Artificial Sequence; identical to SEQ ID NO: 984
  Probe

SEQ ID NO: 43082 - DNA, 39 bp, Artificial Sequence; identical to SEQ ID NO: 986
  Probe

SEQ ID NO: 43083 - DNA, 43 bp, Artificial Sequence; identical to SEQ ID NO: 988
  Probe

SEQ ID NO: 43084 - DNA, 27 bp, Artificial Sequence
  Probe
gattgtgggttcgagtcccatctgggt

SEQ ID NO: 43085 - DNA, 29 bp, Artificial Sequence
  Probe
gcactctggactctgaatccagcgatccg

SEQ ID NO: 43086 - DNA, 50 bp, Artificial Sequence
  Probe
gcactctggactctgaatccagcgatccgagttcaaatctcggtggaacc

SEQ ID NO: 43087 - DNA, 50 bp, Artificial Sequence; identical to SEQ ID NO: 5825
  Probe

SEQ ID NO: 43088 - DNA, 27 bp, Artificial Sequence
  Probe
gcactggtggttcagtggtagaattct

SEQ ID NO: 43089 - DNA, 31 bp, Artificial Sequence; identical to SEQ ID NO: 5827
  Probe

SEQ ID NO: 43090 - DNA, 32 bp, Artificial Sequence; identical to SEQ ID NO: 991
  Probe

SEQ ID NO: 43091 - DNA, 35 bp, Artificial Sequence; identical to SEQ ID NO: 992
  Probe

SEQ ID NO: 43092 - DNA, 21 bp, Artificial Sequence
  Probe
gcagagcccggtaatcgcata

SEQ ID NO: 43093 - DNA, 18 bp, Artificial Sequence
  Probe
gcagagtggggttttgca

SEQ ID NO: 43094 - DNA, 16 bp, Artificial Sequence
  Probe
gcagcgatggccgagt

SEQ ID NO: 43095 - DNA, 26 bp, Artificial Sequence
  Probe
gcataaaacttaaaactttacagtca

SEQ ID NO: 43096 - DNA, 29 bp, Artificial Sequence
  Probe
gcatagctgccttccaagcagttgacccg

SEQ ID NO: 43097 - DNA, 28 bp, Artificial Sequence
  Probe
gcatgggtggttcagtggtagaattctc

SEQ ID NO: 43098 - DNA, 29 bp, Artificial Sequence
  Probe
gcatgggtggttcagtggtagaattctcg

SEQ ID NO: 43099 - DNA, 30 bp, Artificial Sequence; identical to SEQ ID NO: 1002
  Probe

SEQ ID NO: 43100 - DNA, 31 bp, Artificial Sequence; identical to SEQ ID NO: 1003
  Probe

SEQ ID NO: 43101 - DNA, 32 bp, Artificial Sequence; identical to SEQ ID NO: 1004
  Probe

SEQ ID NO: 43102 - DNA, 33 bp, Artificial Sequence; identical to SEQ ID NO: 1005
  Probe

SEQ ID NO: 43103 - DNA, 34 bp, Artificial Sequence; identical to SEQ ID NO: 1006
  Probe

SEQ ID NO: 43104 - DNA, 35 bp, Artificial Sequence; identical to SEQ ID NO: 1007
  Probe

SEQ ID NO: 43105 - DNA, 50 bp, Artificial Sequence; identical to SEQ ID NO: 1010
  Probe

SEQ ID NO: 43106 - DNA, 29 bp, Artificial Sequence
  Probe
gcattaaccttttaagttaaagattaaga

SEQ ID NO: 43107 - DNA, 34 bp, Artificial Sequence; identical to SEQ ID NO: 1011
  Probe

SEQ ID NO: 43108 - DNA, 50 bp, Artificial Sequence; identical to SEQ ID NO: 1012
  Probe

SEQ ID NO: 43109 - DNA, 31 bp, Artificial Sequence; identical to SEQ ID NO: 5884
  Probe

SEQ ID NO: 43110 - DNA, 32 bp, Artificial Sequence; identical to SEQ ID NO: 1013
  Probe

SEQ ID NO: 43111 - DNA, 40 bp, Artificial Sequence; identical to SEQ ID NO: 1016
  Probe

SEQ ID NO: 43112 - DNA, 50 bp, Artificial Sequence; identical to SEQ ID NO: 1020
  Probe

SEQ ID NO: 43113 - DNA, 35 bp, Artificial Sequence; identical to SEQ ID NO: 20735
  Probe

SEQ ID NO: 43114 - DNA, 50 bp, Artificial Sequence; identical to SEQ ID NO: 1024
  Probe

SEQ ID NO: 43115 - DNA, 19 bp, Artificial Sequence
  Probe
gccccagtggcctaatgga

SEQ ID NO: 43116 - DNA, 36 bp, Artificial Sequence; identical to SEQ ID NO: 5950
  Probe

SEQ ID NO: 43117 - DNA, 32 bp, Artificial Sequence
  Probe
gccccagtggcctaatggataaggcattggcc

SEQ ID NO: 43118 - DNA, 36 bp, Artificial Sequence; identical to SEQ ID NO: 1025
  Probe

SEQ ID NO: 43119 - DNA, 18 bp, Artificial Sequence
  Probe
gcccggatagctcagtcg

SEQ ID NO: 43120 - DNA, 19 bp, Artificial Sequence
  Probe
gcccggatagctcagtcgg

SEQ ID NO: 43121 - DNA, 20 bp, Artificial Sequence
  Probe
gcccggatagctcagtcggt

SEQ ID NO: 43122 - DNA, 21 bp, Artificial Sequence
  Probe
gcccggatagctcagtcggta

SEQ ID NO: 43123 - DNA, 22 bp, Artificial Sequence
  Probe
gcccggatagctcagtcggtag

SEQ ID NO: 43124 - DNA, 23 bp, Artificial Sequence
  Probe
gcccggatagctcagtcggtaga

SEQ ID NO: 43125 - DNA, 25 bp, Artificial Sequence
  Probe
gcccggatagctcagtcggtagagc

SEQ ID NO: 43126 - DNA, 26 bp, Artificial Sequence
  Probe
gcccggatagctcagtcggtagagca

SEQ ID NO: 43127 - DNA, 27 bp, Artificial Sequence
  Probe
gcccggatagctcagtcggtagagcat

SEQ ID NO: 43128 - DNA, 29 bp, Artificial Sequence
  Probe
gcccggatagctcagtcggtagagcatca

SEQ ID NO: 43129 - DNA, 30 bp, Artificial Sequence; identical to SEQ ID NO: 1038
  Probe

SEQ ID NO: 43130 - DNA, 31 bp, Artificial Sequence; identical to SEQ ID NO: 1039
  Probe

SEQ ID NO: 43131 - DNA, 32 bp, Artificial Sequence; identical to SEQ ID NO: 1040
  Probe

SEQ ID NO: 43132 - DNA, 33 bp, Artificial Sequence; identical to SEQ ID NO: 1041
  Probe

SEQ ID NO: 43133 - DNA, 34 bp, Artificial Sequence; identical to SEQ ID NO: 1042
  Probe

SEQ ID NO: 43134 - DNA, 35 bp, Artificial Sequence; identical to SEQ ID NO: 1043
  Probe

SEQ ID NO: 43135 - DNA, 36 bp, Artificial Sequence; identical to SEQ ID NO: 1044
  Probe

SEQ ID NO: 43136 - DNA, 37 bp, Artificial Sequence; identical to SEQ ID NO: 1045
  Probe

SEQ ID NO: 43137 - DNA, 40 bp, Artificial Sequence; identical to SEQ ID NO: 13517
  Probe

SEQ ID NO: 43138 - DNA, 50 bp, Artificial Sequence; identical to SEQ ID NO: 1046
  Probe

SEQ ID NO: 43139 - DNA, 16 bp, Artificial Sequence
  Probe
gcccggctagctcagt

SEQ ID NO: 43140 - DNA, 17 bp, Artificial Sequence
  Probe
gcccggctagctcagtc

SEQ ID NO: 43141 - DNA, 18 bp, Artificial Sequence
  Probe
gcccggctagctcagtcg

SEQ ID NO: 43142 - DNA, 31 bp, Artificial Sequence; identical to SEQ ID NO: 1050
  Probe

SEQ ID NO: 43143 - DNA, 32 bp, Artificial Sequence; identical to SEQ ID NO: 5994
  Probe

SEQ ID NO: 43144 - DNA, 33 bp, Artificial Sequence; identical to SEQ ID NO: 1051
  Probe

SEQ ID NO: 43145 - DNA, 19 bp, Artificial Sequence
  Probe
gcccggctagctcagtcgg

SEQ ID NO: 43146 - DNA, 20 bp, Artificial Sequence
  Probe
gcccggctagctcagtcggt

SEQ ID NO: 43147 - DNA, 21 bp, Artificial Sequence
  Probe
gcccggctagctcagtcggta

SEQ ID NO: 43148 - DNA, 23 bp, Artificial Sequence
  Probe
gcccggctagctcagtcggtaga

SEQ ID NO: 43149 - DNA, 25 bp, Artificial Sequence
  Probe
gcccggctagctcagtcggtagagc

SEQ ID NO: 43150 - DNA, 26 bp, Artificial Sequence
  Probe
gcccggctagctcagtcggtagagca

SEQ ID NO: 43151 - DNA, 28 bp, Artificial Sequence
  Probe
gcccggctagctcagtcggtagagcatg

SEQ ID NO: 43152 - DNA, 29 bp, Artificial Sequence
  Probe
gcccggctagctcagtcggtagagcatga

SEQ ID NO: 43153 - DNA, 30 bp, Artificial Sequence; identical to SEQ ID NO: 1062
  Probe

SEQ ID NO: 43154 - DNA, 31 bp, Artificial Sequence; identical to SEQ ID NO: 1063
  Probe

SEQ ID NO: 43155 - DNA, 32 bp, Artificial Sequence; identical to SEQ ID NO: 1064
  Probe

SEQ ID NO: 43156 - DNA, 33 bp, Artificial Sequence; identical to SEQ ID NO: 1065
  Probe

SEQ ID NO: 43157 - DNA, 34 bp, Artificial Sequence; identical to SEQ ID NO: 1066
  Probe

SEQ ID NO: 43158 - DNA, 33 bp, Artificial Sequence; identical to SEQ ID NO: 1070
  Probe

SEQ ID NO: 43159 - DNA, 34 bp, Artificial Sequence; identical to SEQ ID NO: 1071
  Probe

SEQ ID NO: 43160 - DNA, 35 bp, Artificial Sequence; identical to SEQ ID NO: 1072
  Probe

SEQ ID NO: 43161 - DNA, 36 bp, Artificial Sequence; identical to SEQ ID NO: 1073
  Probe

SEQ ID NO: 43162 - DNA, 37 bp, Artificial Sequence; identical to SEQ ID NO: 1074
  Probe

SEQ ID NO: 43163 - DNA, 40 bp, Artificial Sequence; identical to SEQ ID NO: 1076
  Probe

SEQ ID NO: 43164 - DNA, 42 bp, Artificial Sequence; identical to SEQ ID NO: 1077
  Probe

SEQ ID NO: 43165 - DNA, 49 bp, Artificial Sequence; identical to SEQ ID NO: 5999
  Probe

SEQ ID NO: 43166 - DNA, 50 bp, Artificial Sequence; identical to SEQ ID NO: 1078
  Probe

SEQ ID NO: 43167 - DNA, 29 bp, Artificial Sequence
  Probe
gcccggctagctcagtcggtagagcatgg

SEQ ID NO: 43168 - DNA, 30 bp, Artificial Sequence; identical to SEQ ID NO: 1080
  Probe

SEQ ID NO: 43169 - DNA, 31 bp, Artificial Sequence; identical to SEQ ID NO: 1081
  Probe

SEQ ID NO: 43170 - DNA, 32 bp, Artificial Sequence; identical to SEQ ID NO: 1082
  Probe

SEQ ID NO: 43171 - DNA, 33 bp, Artificial Sequence; identical to SEQ ID NO: 1083
  Probe

SEQ ID NO: 43172 - DNA, 34 bp, Artificial Sequence; identical to SEQ ID NO: 1084
  Probe

SEQ ID NO: 43173 - DNA, 35 bp, Artificial Sequence; identical to SEQ ID NO: 1085
  Probe

SEQ ID NO: 43174 - DNA, 36 bp, Artificial Sequence; identical to SEQ ID NO: 1086
  Probe

SEQ ID NO: 43175 - DNA, 16 bp, Artificial Sequence
  Probe
gcccggtaatcgcata

SEQ ID NO: 43176 - DNA, 17 bp, Artificial Sequence
  Probe
gcccggtaatcgcataa

SEQ ID NO: 43177 - DNA, 33 bp, Artificial Sequence; identical to SEQ ID NO: 20846
  Probe

SEQ ID NO: 43178 - DNA, 36 bp, Artificial Sequence; identical to SEQ ID NO: 20847
  Probe

SEQ ID NO: 43179 - DNA, 37 bp, Artificial Sequence; identical to SEQ ID NO: 1093
  Probe

SEQ ID NO: 43180 - DNA, 39 bp, Artificial Sequence
  Probe
gcccggtaatcgcataaaacttaaaactttacagtcaga

SEQ ID NO: 43181 - DNA, 17 bp, Artificial Sequence
  Probe
gccctcagtaagttgca

SEQ ID NO: 43182 - DNA, 32 bp, Artificial Sequence; identical to SEQ ID NO: 6021
  Probe

SEQ ID NO: 43183 - DNA, 28 bp, Artificial Sequence
  Probe
gccgctggtgtagtggtatcatgcaaga

SEQ ID NO: 43184 - DNA, 31 bp, Artificial Sequence; identical to SEQ ID NO: 1101
  Probe

SEQ ID NO: 43185 - DNA, 32 bp, Artificial Sequence; identical to SEQ ID NO: 1102
  Probe

SEQ ID NO: 43186 - DNA, 33 bp, Artificial Sequence; identical to SEQ ID NO: 1103
  Probe

SEQ ID NO: 43187 - DNA, 34 bp, Artificial Sequence; identical to SEQ ID NO: 1104
  Probe

SEQ ID NO: 43188 - DNA, 30 bp, Artificial Sequence; identical to SEQ ID NO: 1105
  Probe

SEQ ID NO: 43189 - DNA, 31 bp, Artificial Sequence; identical to SEQ ID NO: 1106
  Probe

SEQ ID NO: 43190 - DNA, 32 bp, Artificial Sequence; identical to SEQ ID NO: 1107
  Probe

SEQ ID NO: 43191 - DNA, 33 bp, Artificial Sequence; identical to SEQ ID NO: 1108
  Probe

SEQ ID NO: 43192 - DNA, 34 bp, Artificial Sequence; identical to SEQ ID NO: 1109
  Probe

SEQ ID NO: 43193 - DNA, 35 bp, Artificial Sequence; identical to SEQ ID NO: 1110
  Probe

SEQ ID NO: 43194 - DNA, 36 bp, Artificial Sequence; identical to SEQ ID NO: 1111
  Probe

SEQ ID NO: 43195 - DNA, 38 bp, Artificial Sequence
  Probe
gcctcctaagccagggattgtgggttcgagtcccacct

SEQ ID NO: 43196 - DNA, 32 bp, Artificial Sequence; identical to SEQ ID NO: 1112
  Probe

SEQ ID NO: 43197 - DNA, 33 bp, Artificial Sequence; identical to SEQ ID NO: 1113
  Probe

SEQ ID NO: 43198 - DNA, 35 bp, Artificial Sequence; identical to SEQ ID NO: 1114
  Probe

SEQ ID NO: 43199 - DNA, 31 bp, Artificial Sequence; identical to SEQ ID NO: 1115
  Probe

SEQ ID NO: 43200 - DNA, 32 bp, Artificial Sequence; identical to SEQ ID NO: 1116
  Probe

SEQ ID NO: 43201 - DNA, 33 bp, Artificial Sequence; identical to SEQ ID NO: 1117
  Probe

SEQ ID NO: 43202 - DNA, 34 bp, Artificial Sequence; identical to SEQ ID NO: 6054
  Probe

SEQ ID NO: 43203 - DNA, 35 bp, Artificial Sequence; identical to SEQ ID NO: 1118
  Probe

SEQ ID NO: 43204 - DNA, 31 bp, Artificial Sequence; identical to SEQ ID NO: 1120
  Probe

SEQ ID NO: 43205 - DNA, 32 bp, Artificial Sequence; identical to SEQ ID NO: 1121
  Probe

SEQ ID NO: 43206 - DNA, 33 bp, Artificial Sequence; identical to SEQ ID NO: 1122
  Probe

SEQ ID NO: 43207 - DNA, 34 bp, Artificial Sequence; identical to SEQ ID NO: 1123
  Probe

SEQ ID NO: 43208 - DNA, 35 bp, Artificial Sequence; identical to SEQ ID NO: 1124
  Probe

SEQ ID NO: 43209 - DNA, 31 bp, Artificial Sequence; identical to SEQ ID NO: 1126
  Probe

SEQ ID NO: 43210 - DNA, 32 bp, Artificial Sequence; identical to SEQ ID NO: 1127
  Probe

SEQ ID NO: 43211 - DNA, 33 bp, Artificial Sequence; identical to SEQ ID NO: 1128
  Probe

SEQ ID NO: 43212 - DNA, 40 bp, Artificial Sequence; identical to SEQ ID NO: 13616
  Probe

SEQ ID NO: 43213 - DNA, 40 bp, Artificial Sequence; identical to SEQ ID NO: 1131
  Probe

SEQ ID NO: 43214 - DNA, 42 bp, Artificial Sequence; identical to SEQ ID NO: 20966
  Probe

SEQ ID NO: 43215 - DNA, 43 bp, Artificial Sequence; identical to SEQ ID NO: 1132
  Probe

SEQ ID NO: 43216 - DNA, 16 bp, Artificial Sequence
  Probe
gcgaaaggtccccggt

SEQ ID NO: 43217 - DNA, 30 bp, Artificial Sequence
  Probe
gcgatccgagttcaaatctcggtggaacct

SEQ ID NO: 43218 - DNA, 30 bp, Artificial Sequence
  Probe
gcgatccgagttcaaatctcggtgggacct

SEQ ID NO: 43219 - DNA, 16 bp, Artificial Sequence
  Probe
gcgccgctggtgtagt

SEQ ID NO: 43220 - DNA, 17 bp, Artificial Sequence
  Probe
gcgccgctggtgtagtg

SEQ ID NO: 43221 - DNA, 18 bp, Artificial Sequence
  Probe
gcgccgctggtgtagtgg

SEQ ID NO: 43222 - DNA, 19 bp, Artificial Sequence
  Probe
gcgccgctggtgtagtggt

SEQ ID NO: 43223 - DNA, 20 bp, Artificial Sequence
  Probe
gcgccgctggtgtagtggta

SEQ ID NO: 43224 - DNA, 21 bp, Artificial Sequence
  Probe
gcgccgctggtgtagtggtat

SEQ ID NO: 43225 - DNA, 22 bp, Artificial Sequence
  Probe
gcgccgctggtgtagtggtatc

SEQ ID NO: 43226 - DNA, 23 bp, Artificial Sequence
  Probe
gcgccgctggtgtagtggtatca

SEQ ID NO: 43227 - DNA, 25 bp, Artificial Sequence
  Probe
gcgccgctggtgtagtggtatcatg

SEQ ID NO: 43228 - DNA, 26 bp, Artificial Sequence
  Probe
gcgccgctggtgtagtggtatcatgc

SEQ ID NO: 43229 - DNA, 27 bp, Artificial Sequence
  Probe
gcgccgctggtgtagtggtatcatgca

SEQ ID NO: 43230 - DNA, 28 bp, Artificial Sequence
  Probe
gcgccgctggtgtagtggtatcatgcaa

SEQ ID NO: 43231 - DNA, 29 bp, Artificial Sequence
  Probe
gcgccgctggtgtagtggtatcatgcaag

SEQ ID NO: 43232 - DNA, 30 bp, Artificial Sequence; identical to SEQ ID NO: 1149
  Probe

SEQ ID NO: 43233 - DNA, 31 bp, Artificial Sequence; identical to SEQ ID NO: 1150
  Probe

SEQ ID NO: 43234 - DNA, 32 bp, Artificial Sequence; identical to SEQ ID NO: 1151
  Probe

SEQ ID NO: 43235 - DNA, 33 bp, Artificial Sequence; identical to SEQ ID NO: 1152
  Probe

SEQ ID NO: 43236 - DNA, 34 bp, Artificial Sequence; identical to SEQ ID NO: 1153
  Probe

SEQ ID NO: 43237 - DNA, 35 bp, Artificial Sequence; identical to SEQ ID NO: 1154
  Probe

SEQ ID NO: 43238 - DNA, 36 bp, Artificial Sequence; identical to SEQ ID NO: 1155
  Probe

SEQ ID NO: 43239 - DNA, 37 bp, Artificial Sequence; identical to SEQ ID NO: 1156
  Probe

SEQ ID NO: 43240 - DNA, 39 bp, Artificial Sequence; identical to SEQ ID NO: 1157
  Probe

SEQ ID NO: 43241 - DNA, 40 bp, Artificial Sequence; identical to SEQ ID NO: 1158
  Probe

SEQ ID NO: 43242 - DNA, 50 bp, Artificial Sequence; identical to SEQ ID NO: 1161
  Probe

SEQ ID NO: 43243 - DNA, 29 bp, Artificial Sequence
  Probe
gcggcccgggttcgactcccggtgtggga

SEQ ID NO: 43244 - DNA, 29 bp, Artificial Sequence
  Probe
gcggcccgggttcgattcccggtcaggga

SEQ ID NO: 43245 - DNA, 32 bp, Artificial Sequence; identical to SEQ ID NO: 6106
  Probe

SEQ ID NO: 43246 - DNA, 33 bp, Artificial Sequence; identical to SEQ ID NO: 6107
  Probe

SEQ ID NO: 43247 - DNA, 34 bp, Artificial Sequence; identical to SEQ ID NO: 1167
  Probe

SEQ ID NO: 43248 - DNA, 29 bp, Artificial Sequence
  Probe
gcgggagaccggggttcgattccccgacg

SEQ ID NO: 43249 - DNA, 30 bp, Artificial Sequence; identical to SEQ ID NO: 1169
  Probe

SEQ ID NO: 43250 - DNA, 31 bp, Artificial Sequence; identical to SEQ ID NO: 1170
  Probe

SEQ ID NO: 43251 - DNA, 32 bp, Artificial Sequence; identical to SEQ ID NO: 1171
  Probe

SEQ ID NO: 43252 - DNA, 33 bp, Artificial Sequence; identical to SEQ ID NO: 1172
  Probe

SEQ ID NO: 43253 - DNA, 34 bp, Artificial Sequence; identical to SEQ ID NO: 1173
  Probe

SEQ ID NO: 43254 - DNA, 32 bp, Artificial Sequence; identical to SEQ ID NO: 1185
  Probe

SEQ ID NO: 43255 - DNA, 33 bp, Artificial Sequence; identical to SEQ ID NO: 1186
  Probe

SEQ ID NO: 43256 - DNA, 34 bp, Artificial Sequence; identical to SEQ ID NO: 1187
  Probe

SEQ ID NO: 43257 - DNA, 35 bp, Artificial Sequence; identical to SEQ ID NO: 1188
  Probe

SEQ ID NO: 43258 - DNA, 36 bp, Artificial Sequence; identical to SEQ ID NO: 1189
  Probe

SEQ ID NO: 43259 - DNA, 40 bp, Artificial Sequence; identical to SEQ ID NO: 1193
  Probe

SEQ ID NO: 43260 - DNA, 44 bp, Artificial Sequence; identical to SEQ ID NO: 1194
  Probe

SEQ ID NO: 43261 - DNA, 50 bp, Artificial Sequence; identical to SEQ ID NO: 1195
  Probe

SEQ ID NO: 43262 - DNA, 24 bp, Artificial Sequence
  Probe
gctatccattggtcttaggcccca

SEQ ID NO: 43263 - DNA, 43 bp, Artificial Sequence
  Probe
gctatcgggcccataccccgaaaatgttggttatacccttccc

SEQ ID NO: 43264 - DNA, 16 bp, Artificial Sequence
  Probe
gctcacaagaactgct

SEQ ID NO: 43265 - DNA, 50 bp, Artificial Sequence; identical to SEQ ID NO: 1205
  Probe

SEQ ID NO: 43266 - DNA, 33 bp, Artificial Sequence; identical to SEQ ID NO: 6289
  Probe

SEQ ID NO: 43267 - DNA, 41 bp, Artificial Sequence; identical to SEQ ID NO: 21313
  Probe

SEQ ID NO: 43268 - DNA, 41 bp, Artificial Sequence; identical to SEQ ID NO: 21315
  Probe

SEQ ID NO: 43269 - DNA, 23 bp, Artificial Sequence
  Probe
gcttctgtagtgtagtggttatc

SEQ ID NO: 43270 - DNA, 28 bp, Artificial Sequence
  Probe
gcttctgtagtgtagtggttatcacgtt

SEQ ID NO: 43271 - DNA, 31 bp, Artificial Sequence; identical to SEQ ID NO: 1213
  Probe

SEQ ID NO: 43272 - DNA, 32 bp, Artificial Sequence; identical to SEQ ID NO: 1214
  Probe

SEQ ID NO: 43273 - DNA, 33 bp, Artificial Sequence; identical to SEQ ID NO: 1215
  Probe

SEQ ID NO: 43274 - DNA, 34 bp, Artificial Sequence; identical to SEQ ID NO: 1216
  Probe

SEQ ID NO: 43275 - DNA, 50 bp, Artificial Sequence; identical to SEQ ID NO: 1219
  Probe

SEQ ID NO: 43276 - DNA, 32 bp, Artificial Sequence; identical to SEQ ID NO: 1225
  Probe

SEQ ID NO: 43277 - DNA, 33 bp, Artificial Sequence; identical to SEQ ID NO: 1226
  Probe

SEQ ID NO: 43278 - DNA, 31 bp, Artificial Sequence; identical to SEQ ID NO: 1236
  Probe

SEQ ID NO: 43279 - DNA, 27 bp, Artificial Sequence
  Probe
ggagaccggggttcgattccccgacgg

SEQ ID NO: 43280 - DNA, 28 bp, Artificial Sequence
  Probe
ggagaccggggttcgattccccgacggg

SEQ ID NO: 43281 - DNA, 29 bp, Artificial Sequence
  Probe
ggagaccggggttcgattccccgacgggg

SEQ ID NO: 43282 - DNA, 30 bp, Artificial Sequence; identical to SEQ ID NO: 1241
  Probe

SEQ ID NO: 43283 - DNA, 31 bp, Artificial Sequence; identical to SEQ ID NO: 1242
  Probe

SEQ ID NO: 43284 - DNA, 19 bp, Artificial Sequence
  Probe
ggagatgaaaacctttttc

SEQ ID NO: 43285 - DNA, 23 bp, Artificial Sequence
  Probe
ggagatgaaaacctttttccaag

SEQ ID NO: 43286 - DNA, 25 bp, Artificial Sequence
  Probe
ggagatgaaaacctttttccaagga

SEQ ID NO: 43287 - DNA, 16 bp, Artificial Sequence
  Probe
ggagcttaaaccccct

SEQ ID NO: 43288 - DNA, 27 bp, Artificial Sequence
  Probe
ggatggggtgtgataggtggcacggag

SEQ ID NO: 43289 - DNA, 28 bp, Artificial Sequence
  Probe
ggatggggtgtgataggtggcacggaga

SEQ ID NO: 43290 - DNA, 28 bp, Artificial Sequence
  Probe
ggattcggcgctctcaccgccgcggccc

SEQ ID NO: 43291 - DNA, 28 bp, Artificial Sequence
  Probe
ggattgtgggttcgagtcccatctgggt

SEQ ID NO: 43292 - DNA, 39 bp, Artificial Sequence; identical to SEQ ID NO: 6419
  Probe

SEQ ID NO: 43293 - DNA, 40 bp, Artificial Sequence; identical to SEQ ID NO: 21535
  Probe

SEQ ID NO: 43294 - DNA, 41 bp, Artificial Sequence; identical to SEQ ID NO: 21536
  Probe

SEQ ID NO: 43295 - DNA, 42 bp, Artificial Sequence; identical to SEQ ID NO: 21537
  Probe

SEQ ID NO: 43296 - DNA, 32 bp, Artificial Sequence; identical to SEQ ID NO: 1262
  Probe

SEQ ID NO: 43297 - DNA, 33 bp, Artificial Sequence; identical to SEQ ID NO: 1263
  Probe

SEQ ID NO: 43298 - DNA, 29 bp, Artificial Sequence
  Probe
ggccccgggttcaatccccggcacctcca

SEQ ID NO: 43299 - DNA, 29 bp, Artificial Sequence
  Probe
ggccccgggttcgatccccggcatctcca

SEQ ID NO: 43300 - DNA, 27 bp, Artificial Sequence
  Probe
ggcccgggttcgactcccggtatggga

SEQ ID NO: 43301 - DNA, 28 bp, Artificial Sequence
  Probe
ggcccgggttcgactcccggtatgggaa

SEQ ID NO: 43302 - DNA, 28 bp, Artificial Sequence
  Probe
ggcccgggttcgactcccggtgtgggaa

SEQ ID NO: 43303 - DNA, 30 bp, Artificial Sequence; identical to SEQ ID NO: 1267
  Probe

SEQ ID NO: 43304 - DNA, 31 bp, Artificial Sequence; identical to SEQ ID NO: 1268
  Probe

SEQ ID NO: 43305 - DNA, 32 bp, Artificial Sequence; identical to SEQ ID NO: 1269
  Probe

SEQ ID NO: 43306 - DNA, 33 bp, Artificial Sequence; identical to SEQ ID NO: 1270
  Probe

SEQ ID NO: 43307 - DNA, 34 bp, Artificial Sequence; identical to SEQ ID NO: 21572
  Probe

SEQ ID NO: 43308 - DNA, 18 bp, Artificial Sequence
  Probe
ggccgcgtggcctaatgg

SEQ ID NO: 43309 - DNA, 19 bp, Artificial Sequence
  Probe
ggccgcgtggcctaatgga

SEQ ID NO: 43310 - DNA, 32 bp, Artificial Sequence; identical to SEQ ID NO: 6452
  Probe

SEQ ID NO: 43311 - DNA, 33 bp, Artificial Sequence
  Probe
ggcctcgtggcgcaacggtagcgcgtctgactc

SEQ ID NO: 43312 - DNA, 34 bp, Artificial Sequence
  Probe
ggcctcgtggcgcaacggtagcgcgtctgactcc

SEQ ID NO: 43313 - DNA, 26 bp, Artificial Sequence
  Probe
ggcgccgtggcttagttggttaaagc

SEQ ID NO: 43314 - DNA, 27 bp, Artificial Sequence
  Probe
ggctagctcagtcggtagagcatggga

SEQ ID NO: 43315 - DNA, 50 bp, Artificial Sequence; identical to SEQ ID NO: 1296
  Probe

SEQ ID NO: 43316 - DNA, 19 bp, Artificial Sequence
  Probe
ggctccatagctcagtggt

SEQ ID NO: 43317 - DNA, 31 bp, Artificial Sequence; identical to SEQ ID NO: 1298
  Probe

SEQ ID NO: 43318 - DNA, 32 bp, Artificial Sequence; identical to SEQ ID NO: 1299
  Probe

SEQ ID NO: 43319 - DNA, 32 bp, Artificial Sequence; identical to SEQ ID NO: 1304
  Probe

SEQ ID NO: 43320 - DNA, 33 bp, Artificial Sequence; identical to SEQ ID NO: 6492
  Probe

SEQ ID NO: 43321 - DNA, 33 bp, Artificial Sequence; identical to SEQ ID NO: 32319
  Probe

SEQ ID NO: 43322 - DNA, 42 bp, Artificial Sequence; identical to SEQ ID NO: 21672
  Probe

SEQ ID NO: 43323 - DNA, 29 bp, Artificial Sequence
  Probe
gggagaccggggttcgattccccgacggg

SEQ ID NO: 43324 - DNA, 31 bp, Artificial Sequence; identical to SEQ ID NO: 1316
  Probe

SEQ ID NO: 43325 - DNA, 32 bp, Artificial Sequence; identical to SEQ ID NO: 1317
  Probe

SEQ ID NO: 43326 - DNA, 21 bp, Artificial Sequence
  Probe
gggatgggttcgattctcata

SEQ ID NO: 43327 - DNA, 25 bp, Artificial Sequence
  Probe
gggatgggttcgattctcatagtcc

SEQ ID NO: 43328 - DNA, 26 bp, Artificial Sequence
  Probe
gggatgggttcgattctcatagtcct

SEQ ID NO: 43329 - DNA, 29 bp, Artificial Sequence
  Probe
gggattgtgggttcgagtcccatctgggt

SEQ ID NO: 43330 - DNA, 16 bp, Artificial Sequence
  Probe
ggggatgtagctcagt

SEQ ID NO: 43331 - DNA, 17 bp, Artificial Sequence
  Probe
ggggatgtagctcagtg

SEQ ID NO: 43332 - DNA, 18 bp, Artificial Sequence
  Probe
ggggatgtagctcagtgg

SEQ ID NO: 43333 - DNA, 19 bp, Artificial Sequence
  Probe
ggggatgtagctcagtggt

SEQ ID NO: 43334 - DNA, 20 bp, Artificial Sequence
  Probe
ggggatgtagctcagtggta

SEQ ID NO: 43335 - DNA, 22 bp, Artificial Sequence
  Probe
ggggatgtagctcagtggtaga

SEQ ID NO: 43336 - DNA, 24 bp, Artificial Sequence
  Probe
ggggatgtagctcagtggtagagc

SEQ ID NO: 43337 - DNA, 30 bp, Artificial Sequence; identical to SEQ ID NO: 1335
  Probe

SEQ ID NO: 43338 - DNA, 31 bp, Artificial Sequence; identical to SEQ ID NO: 1336
  Probe

SEQ ID NO: 43339 - DNA, 32 bp, Artificial Sequence; identical to SEQ ID NO: 1337
  Probe

SEQ ID NO: 43340 - DNA, 33 bp, Artificial Sequence; identical to SEQ ID NO: 1338
  Probe

SEQ ID NO: 43341 - DNA, 30 bp, Artificial Sequence; identical to SEQ ID NO: 10779
  Probe

SEQ ID NO: 43342 - DNA, 32 bp, Artificial Sequence; identical to SEQ ID NO: 1340
  Probe

SEQ ID NO: 43343 - DNA, 30 bp, Artificial Sequence; identical to SEQ ID NO: 21865
  Probe

SEQ ID NO: 43344 - DNA, 19 bp, Artificial Sequence
  Probe
gggggattagctcaaatgg

SEQ ID NO: 43345 - DNA, 20 bp, Artificial Sequence
  Probe
gggggattagctcaaatggt

SEQ ID NO: 43346 - DNA, 21 bp, Artificial Sequence
  Probe
gggggattagctcaaatggta

SEQ ID NO: 43347 - DNA, 23 bp, Artificial Sequence
  Probe
gggggattagctcaaatggtaga

SEQ ID NO: 43348 - DNA, 25 bp, Artificial Sequence
  Probe
gggggattagctcaaatggtagagc

SEQ ID NO: 43349 - DNA, 31 bp, Artificial Sequence; identical to SEQ ID NO: 21876
  Probe

SEQ ID NO: 43350 - DNA, 30 bp, Artificial Sequence; identical to SEQ ID NO: 37080
  Probe

SEQ ID NO: 43351 - DNA, 31 bp, Artificial Sequence; identical to SEQ ID NO: 6580
  Probe

SEQ ID NO: 43352 - DNA, 32 bp, Artificial Sequence; identical to SEQ ID NO: 1351
  Probe

SEQ ID NO: 43353 - DNA, 33 bp, Artificial Sequence; identical to SEQ ID NO: 1352
  Probe

SEQ ID NO: 43354 - DNA, 34 bp, Artificial Sequence; identical to SEQ ID NO: 1353
  Probe

SEQ ID NO: 43355 - DNA, 35 bp, Artificial Sequence; identical to SEQ ID NO: 1354
  Probe

SEQ ID NO: 43356 - DNA, 30 bp, Artificial Sequence; identical to SEQ ID NO: 21882
  Probe

SEQ ID NO: 43357 - DNA, 31 bp, Artificial Sequence; identical to SEQ ID NO: 6584
  Probe

SEQ ID NO: 43358 - DNA, 32 bp, Artificial Sequence; identical to SEQ ID NO: 1355
  Probe

SEQ ID NO: 43359 - DNA, 33 bp, Artificial Sequence; identical to SEQ ID NO: 1356
  Probe

SEQ ID NO: 43360 - DNA, 34 bp, Artificial Sequence; identical to SEQ ID NO: 1357
  Probe

SEQ ID NO: 43361 - DNA, 33 bp, Artificial Sequence; identical to SEQ ID NO: 6585
  Probe

SEQ ID NO: 43362 - DNA, 31 bp, Artificial Sequence; identical to SEQ ID NO: 21895
  Probe

SEQ ID NO: 43363 - DNA, 33 bp, Artificial Sequence; identical to SEQ ID NO: 6590
  Probe

SEQ ID NO: 43364 - DNA, 34 bp, Artificial Sequence; identical to SEQ ID NO: 13861
  Probe

SEQ ID NO: 43365 - DNA, 35 bp, Artificial Sequence; identical to SEQ ID NO: 1358
  Probe

SEQ ID NO: 43366 - DNA, 30 bp, Artificial Sequence
  Probe
gggggtatagctcagtggtagagcgcgtgc

SEQ ID NO: 43367 - DNA, 32 bp, Artificial Sequence; identical to SEQ ID NO: 1360
  Probe

SEQ ID NO: 43368 - DNA, 19 bp, Artificial Sequence
  Probe
gggggtgtagctcagtggt

SEQ ID NO: 43369 - DNA, 24 bp, Artificial Sequence
  Probe
gggggtgtagctcagtggtagagc

SEQ ID NO: 43370 - DNA, 30 bp, Artificial Sequence; identical to SEQ ID NO: 40930
  Probe

SEQ ID NO: 43371 - DNA, 31 bp, Artificial Sequence
  Probe
gggggtgtagctcagtggtagagcatttgac

SEQ ID NO: 43372 - DNA, 32 bp, Artificial Sequence; identical to SEQ ID NO: 1365
  Probe

SEQ ID NO: 43373 - DNA, 33 bp, Artificial Sequence; identical to SEQ ID NO: 6614
  Probe

SEQ ID NO: 43374 - DNA, 34 bp, Artificial Sequence; identical to SEQ ID NO: 1366
  Probe

SEQ ID NO: 43375 - DNA, 29 bp, Artificial Sequence
  Probe
gggggtgtagctcagtggtagagcgcgtg

SEQ ID NO: 43376 - DNA, 30 bp, Artificial Sequence; identical to SEQ ID NO: 1367
  Probe

SEQ ID NO: 43377 - DNA, 31 bp, Artificial Sequence; identical to SEQ ID NO: 1368
  Probe

SEQ ID NO: 43378 - DNA, 32 bp, Artificial Sequence; identical to SEQ ID NO: 1369
  Probe

SEQ ID NO: 43379 - DNA, 30 bp, Artificial Sequence
  Probe
gggtcgcgagttcaaatctcgctggggcct

SEQ ID NO: 43380 - DNA, 50 bp, Artificial Sequence; identical to SEQ ID NO: 6656
  Probe

SEQ ID NO: 43381 - DNA, 28 bp, Artificial Sequence
  Probe
gggtgtagctcagtggtagagcgcgtgc

SEQ ID NO: 43382 - DNA, 26 bp, Artificial Sequence
  Probe
gggttcaatccccggcacctccacca

SEQ ID NO: 43383 - DNA, 33 bp, Artificial Sequence; identical to SEQ ID NO: 1381
  Probe

SEQ ID NO: 43384 - DNA, 16 bp, Artificial Sequence
  Probe
ggtagcgtggccgagc

SEQ ID NO: 43385 - DNA, 17 bp, Artificial Sequence
  Probe
ggtagcgtggccgagcg

SEQ ID NO: 43386 - DNA, 18 bp, Artificial Sequence
  Probe
ggtagcgtggccgagcgg

SEQ ID NO: 43387 - DNA, 19 bp, Artificial Sequence
  Probe
ggtagcgtggccgagcggt

SEQ ID NO: 43388 - DNA, 20 bp, Artificial Sequence
  Probe
ggtagcgtggccgagcggtc

SEQ ID NO: 43389 - DNA, 21 bp, Artificial Sequence
  Probe
ggtagcgtggccgagcggtct

SEQ ID NO: 43390 - DNA, 22 bp, Artificial Sequence
  Probe
ggtagcgtggccgagcggtcta

SEQ ID NO: 43391 - DNA, 23 bp, Artificial Sequence
  Probe
ggtagcgtggccgagcggtctaa

SEQ ID NO: 43392 - DNA, 34 bp, Artificial Sequence; identical to SEQ ID NO: 22077
  Probe

SEQ ID NO: 43393 - DNA, 35 bp, Artificial Sequence; identical to SEQ ID NO: 6708
  Probe

SEQ ID NO: 43394 - DNA, 16 bp, Artificial Sequence
  Probe
ggtagcgtggccgagt

SEQ ID NO: 43395 - DNA, 25 bp, Artificial Sequence
  Probe
ggtagcgtggccgagtggtctaagg

SEQ ID NO: 43396 - DNA, 29 bp, Artificial Sequence
  Probe
ggtagcgtggccgagtggtctaaggcgct

SEQ ID NO: 43397 - DNA, 34 bp, Artificial Sequence; identical to SEQ ID NO: 1404
  Probe

SEQ ID NO: 43398 - DNA, 35 bp, Artificial Sequence; identical to SEQ ID NO: 1405
  Probe

SEQ ID NO: 43399 - DNA, 36 bp, Artificial Sequence; identical to SEQ ID NO: 13914
  Probe

SEQ ID NO: 43400 - DNA, 27 bp, Artificial Sequence
  Probe
ggtccagggttcaagtccctgttcggg

SEQ ID NO: 43401 - DNA, 27 bp, Artificial Sequence
  Probe
ggtcgtgggttcgagccccacgttggg

SEQ ID NO: 43402 - DNA, 18 bp, Artificial Sequence
  Probe
ggtcgtggttgtagtccg

SEQ ID NO: 43403 - DNA, 20 bp, Artificial Sequence
  Probe
ggtcgtggttgtagtccgtg

SEQ ID NO: 43404 - DNA, 21 bp, Artificial Sequence
  Probe
ggtcgtggttgtagtccgtgc

SEQ ID NO: 43405 - DNA, 22 bp, Artificial Sequence
  Probe
ggtcgtggttgtagtccgtgcg

SEQ ID NO: 43406 - DNA, 24 bp, Artificial Sequence
  Probe
ggtcgtggttgtagtccgtgcgag

SEQ ID NO: 43407 - DNA, 25 bp, Artificial Sequence
  Probe
ggtcgtggttgtagtccgtgcgaga

SEQ ID NO: 43408 - DNA, 26 bp, Artificial Sequence
  Probe
ggtcgtggttgtagtccgtgcgagaa

SEQ ID NO: 43409 - DNA, 28 bp, Artificial Sequence
  Probe
ggtcgtggttgtagtccgtgcgagaata

SEQ ID NO: 43410 - DNA, 25 bp, Artificial Sequence
  Probe
ggttcaatccccggcacctccacca

SEQ ID NO: 43411 - DNA, 16 bp, Artificial Sequence
  Probe
ggttccatagtgtagc

SEQ ID NO: 43412 - DNA, 17 bp, Artificial Sequence
  Probe
ggttccatagtgtagcg

SEQ ID NO: 43413 - DNA, 18 bp, Artificial Sequence
  Probe
ggttccatagtgtagcgg

SEQ ID NO: 43414 - DNA, 19 bp, Artificial Sequence
  Probe
ggttccatagtgtagcggt

SEQ ID NO: 43415 - DNA, 23 bp, Artificial Sequence
  Probe
ggttccatagtgtagcggttatc

SEQ ID NO: 43416 - DNA, 28 bp, Artificial Sequence
  Probe
ggttccatagtgtagcggttatcacgtc

SEQ ID NO: 43417 - DNA, 31 bp, Artificial Sequence; identical to SEQ ID NO: 1432
  Probe

SEQ ID NO: 43418 - DNA, 32 bp, Artificial Sequence; identical to SEQ ID NO: 1433
  Probe

SEQ ID NO: 43419 - DNA, 33 bp, Artificial Sequence; identical to SEQ ID NO: 1434
  Probe

SEQ ID NO: 43420 - DNA, 34 bp, Artificial Sequence; identical to SEQ ID NO: 1435
  Probe

SEQ ID NO: 43421 - DNA, 50 bp, Artificial Sequence; identical to SEQ ID NO: 6812
  Probe

SEQ ID NO: 43422 - DNA, 22 bp, Artificial Sequence
  Probe
ggttccatagtgtagtggttat

SEQ ID NO: 43423 - DNA, 23 bp, Artificial Sequence
  Probe
ggttccatagtgtagtggttatc

SEQ ID NO: 43424 - DNA, 24 bp, Artificial Sequence
  Probe
ggttccatagtgtagtggttatca

SEQ ID NO: 43425 - DNA, 25 bp, Artificial Sequence
  Probe
ggttccatagtgtagtggttatcac

SEQ ID NO: 43426 - DNA, 31 bp, Artificial Sequence; identical to SEQ ID NO: 1443
  Probe

SEQ ID NO: 43427 - DNA, 32 bp, Artificial Sequence; identical to SEQ ID NO: 1444
  Probe

SEQ ID NO: 43428 - DNA, 33 bp, Artificial Sequence; identical to SEQ ID NO: 1445
  Probe

SEQ ID NO: 43429 - DNA, 34 bp, Artificial Sequence; identical to SEQ ID NO: 1446
  Probe

SEQ ID NO: 43430 - DNA, 26 bp, Artificial Sequence
  Probe
ggttccatagtgtagtggttatcacg

SEQ ID NO: 43431 - DNA, 28 bp, Artificial Sequence
  Probe
ggttccatagtgtagtggttatcacgtc

SEQ ID NO: 43432 - DNA, 29 bp, Artificial Sequence
  Probe
ggttccatagtgtagtggttatcacgtct

SEQ ID NO: 43433 - DNA, 30 bp, Artificial Sequence; identical to SEQ ID NO: 1451
  Probe

SEQ ID NO: 43434 - DNA, 31 bp, Artificial Sequence; identical to SEQ ID NO: 1452
  Probe

SEQ ID NO: 43435 - DNA, 32 bp, Artificial Sequence; identical to SEQ ID NO: 1453
  Probe

SEQ ID NO: 43436 - DNA, 33 bp, Artificial Sequence; identical to SEQ ID NO: 1454
  Probe

SEQ ID NO: 43437 - DNA, 34 bp, Artificial Sequence; identical to SEQ ID NO: 1455
  Probe

SEQ ID NO: 43438 - DNA, 36 bp, Artificial Sequence; identical to SEQ ID NO: 1456
  Probe

SEQ ID NO: 43439 - DNA, 49 bp, Artificial Sequence; identical to SEQ ID NO: 22315
  Probe

SEQ ID NO: 43440 - DNA, 50 bp, Artificial Sequence; identical to SEQ ID NO: 1457
  Probe

SEQ ID NO: 43441 - DNA, 33 bp, Artificial Sequence; identical to SEQ ID NO: 1458
  Probe

SEQ ID NO: 43442 - DNA, 22 bp, Artificial Sequence
  Probe
ggttcgaaaccgggcggaaaca

SEQ ID NO: 43443 - DNA, 22 bp, Artificial Sequence
  Probe
ggttcgaatcccaccgctgcca

SEQ ID NO: 43444 - DNA, 22 bp, Artificial Sequence
  Probe
ggttcgaatccgagtcacggca

SEQ ID NO: 43445 - DNA, 22 bp, Artificial Sequence
  Probe
ggttcgatccccggcatctcca

SEQ ID NO: 43446 - DNA, 22 bp, Artificial Sequence
  Probe
ggttcgatcccgggtttcggca

SEQ ID NO: 43447 - DNA, 22 bp, Artificial Sequence
  Probe
ggttcgattcccggccaacgca

SEQ ID NO: 43448 - DNA, 22 bp, Artificial Sequence
  Probe
ggttcgattcccgggcggcgca

SEQ ID NO: 43449 - DNA, 19 bp, Artificial Sequence
  Probe
ggttcgattctcatagtcc

SEQ ID NO: 43450 - DNA, 20 bp, Artificial Sequence
  Probe
ggttcgattctcatagtcct

SEQ ID NO: 43451 - DNA, 27 bp, Artificial Sequence
  Probe
ggttggtggttcgagcccacccaggga

SEQ ID NO: 43452 - DNA, 29 bp, Artificial Sequence
  Probe
ggttggtggttcgagcccacccagggacg

SEQ ID NO: 43453 - DNA, 32 bp, Artificial Sequence; identical to SEQ ID NO: 22374
  Probe

SEQ ID NO: 43454 - DNA, 34 bp, Artificial Sequence; identical to SEQ ID NO: 32769
  Probe

SEQ ID NO: 43455 - DNA, 36 bp, Artificial Sequence; identical to SEQ ID NO: 6870
  Probe

SEQ ID NO: 43456 - DNA, 33 bp, Artificial Sequence; identical to SEQ ID NO: 6913
  Probe

SEQ ID NO: 43457 - DNA, 36 bp, Artificial Sequence; identical to SEQ ID NO: 14013
  Probe

SEQ ID NO: 43458 - DNA, 24 bp, Artificial Sequence
  Probe
gtagtcgtggccgagtggttaagg

SEQ ID NO: 43459 - DNA, 20 bp, Artificial Sequence
  Probe
gtcacgcgggagaccggggt

SEQ ID NO: 43460 - DNA, 39 bp, Artificial Sequence; identical to SEQ ID NO: 1474
  Probe

SEQ ID NO: 43461 - DNA, 50 bp, Artificial Sequence; identical to SEQ ID NO: 1478
  Probe

SEQ ID NO: 43462 - DNA, 25 bp, Artificial Sequence
  Probe
gtcaggatggccgagtggtctaagg

SEQ ID NO: 43463 - DNA, 32 bp, Artificial Sequence; identical to SEQ ID NO: 14044
  Probe

SEQ ID NO: 43464 - DNA, 26 bp, Artificial Sequence
  Probe
gtccagggttcaagtccctgttcggg

SEQ ID NO: 43465 - DNA, 18 bp, Artificial Sequence
  Probe
gtccttgtagtataaact

SEQ ID NO: 43466 - DNA, 26 bp, Artificial Sequence
  Probe
gtccttgtagtataaactaatacacc

SEQ ID NO: 43467 - DNA, 27 bp, Artificial Sequence
  Probe
gtccttgtagtataaactaatacacca

SEQ ID NO: 43468 - DNA, 28 bp, Artificial Sequence
  Probe
gtccttgtagtataaactaatacaccag

SEQ ID NO: 43469 - DNA, 29 bp, Artificial Sequence
  Probe
gtccttgtagtataaactaatacaccagt

SEQ ID NO: 43470 - DNA, 30 bp, Artificial Sequence; identical to SEQ ID NO: 1487
  Probe

SEQ ID NO: 43471 - DNA, 31 bp, Artificial Sequence; identical to SEQ ID NO: 1488
  Probe

SEQ ID NO: 43472 - DNA, 50 bp, Artificial Sequence; identical to SEQ ID NO: 1489
  Probe

SEQ ID NO: 43473 - DNA, 17 bp, Artificial Sequence
  Probe
gtcggtagagcatcaga

SEQ ID NO: 43474 - DNA, 17 bp, Artificial Sequence
  Probe
gtcgtggttgtagtccg

SEQ ID NO: 43475 - DNA, 19 bp, Artificial Sequence
  Probe
gtcgtggttgtagtccgtg

SEQ ID NO: 43476 - DNA, 20 bp, Artificial Sequence
  Probe
gtcgtggttgtagtccgtgc

SEQ ID NO: 43477 - DNA, 21 bp, Artificial Sequence
  Probe
gtcgtggttgtagtccgtgcg

SEQ ID NO: 43478 - DNA, 23 bp, Artificial Sequence
  Probe
gtcgtggttgtagtccgtgcgag

SEQ ID NO: 43479 - DNA, 24 bp, Artificial Sequence
  Probe
gtcgtggttgtagtccgtgcgaga

SEQ ID NO: 43480 - DNA, 25 bp, Artificial Sequence
  Probe
gtcgtggttgtagtccgtgcgagaa

SEQ ID NO: 43481 - DNA, 23 bp, Artificial Sequence
  Probe
gtctcataatctgaaggtcgtga

SEQ ID NO: 43482 - DNA, 25 bp, Artificial Sequence
  Probe
gtctcataatctgaaggtcgtgagt

SEQ ID NO: 43483 - DNA, 32 bp, Artificial Sequence; identical to SEQ ID NO: 14072
  Probe

SEQ ID NO: 43484 - DNA, 33 bp, Artificial Sequence; identical to SEQ ID NO: 1508
  Probe

SEQ ID NO: 43485 - DNA, 25 bp, Artificial Sequence
  Probe
gtggtctagtggttaggattcggcg

SEQ ID NO: 43486 - DNA, 27 bp, Artificial Sequence
  Probe
gtggtctagtggttaggattcggcgct

SEQ ID NO: 43487 - DNA, 21 bp, Artificial Sequence
  Probe
gtggttagtactctgcgttgt

SEQ ID NO: 43488 - DNA, 18 bp, Artificial Sequence
  Probe
gtggttgtagtccgtgcg

SEQ ID NO: 43489 - DNA, 20 bp, Artificial Sequence
  Probe
gtggttgtagtccgtgcgag

SEQ ID NO: 43490 - DNA, 22 bp, Artificial Sequence
  Probe
gtggttgtagtccgtgcgagaa

SEQ ID NO: 43491 - DNA, 28 bp, Artificial Sequence
  Probe
gtgtttgtgggtttaagtcccattggtc

SEQ ID NO: 43492 - DNA, 29 bp, Artificial Sequence
  Probe
gtgtttgtgggtttaagtcccattggtct

SEQ ID NO: 43493 - DNA, 30 bp, Artificial Sequence; identical to SEQ ID NO: 1519
  Probe

SEQ ID NO: 43494 - DNA, 37 bp, Artificial Sequence; identical to SEQ ID NO: 22938
  Probe

SEQ ID NO: 43495 - DNA, 38 bp, Artificial Sequence; identical to SEQ ID NO: 7127
  Probe

SEQ ID NO: 43496 - DNA, 21 bp, Artificial Sequence
  Probe
gttaagatggcagagcccggt

SEQ ID NO: 43497 - DNA, 28 bp, Artificial Sequence
  Probe
gttaagatggcagagcccggtaatcgca

SEQ ID NO: 43498 - DNA, 37 bp, Artificial Sequence; identical to SEQ ID NO: 1523
  Probe

SEQ ID NO: 43499 - DNA, 21 bp, Artificial Sequence
  Probe
gttcaaatccgggtgccccct

SEQ ID NO: 43500 - DNA, 22 bp, Artificial Sequence
  Probe
gttcaaatccgggtgccccctc

SEQ ID NO: 43501 - DNA, 24 bp, Artificial Sequence
  Probe
gttcaatccccggcacctccacca

SEQ ID NO: 43502 - DNA, 30 bp, Artificial Sequence; identical to SEQ ID NO: 14124
  Probe

SEQ ID NO: 43503 - DNA, 21 bp, Artificial Sequence
  Probe
gttcgaaaccgggcggaaaca

SEQ ID NO: 43504 - DNA, 21 bp, Artificial Sequence
  Probe
gttcgaatcccactcctgaca

SEQ ID NO: 43505 - DNA, 21 bp, Artificial Sequence
  Probe
gttcgaatccgagtcacggca

SEQ ID NO: 43506 - DNA, 21 bp, Artificial Sequence
  Probe
gttcgaatcctgccgactacg

SEQ ID NO: 43507 - DNA, 21 bp, Artificial Sequence
  Probe
gttcgatcccgggtttcggca

SEQ ID NO: 43508 - DNA, 21 bp, Artificial Sequence
  Probe
gttcgattcccgggcggcgca

SEQ ID NO: 43509 - DNA, 24 bp, Artificial Sequence
  Probe
gttgatgcagagtggggttttgca

SEQ ID NO: 43510 - DNA, 27 bp, Artificial Sequence
  Probe
gttgatgcagagtggggttttgcagtc

SEQ ID NO: 43511 - DNA, 50 bp, Artificial Sequence; identical to SEQ ID NO: 7209
  Probe

SEQ ID NO: 43512 - DNA, 26 bp, Artificial Sequence
  Probe
gttggtggttcgagcccacccaggga

SEQ ID NO: 43513 - DNA, 30 bp, Artificial Sequence; identical to SEQ ID NO: 1536
  Probe

SEQ ID NO: 43514 - DNA, 34 bp, Artificial Sequence; identical to SEQ ID NO: 1538
  Probe

SEQ ID NO: 43515 - DNA, 35 bp, Artificial Sequence; identical to SEQ ID NO: 1539
  Probe

SEQ ID NO: 43516 - DNA, 36 bp, Artificial Sequence; identical to SEQ ID NO: 1540
  Probe

SEQ ID NO: 43517 - DNA, 16 bp, Artificial Sequence
  Probe
gtttccgtagtgtagc

SEQ ID NO: 43518 - DNA, 19 bp, Artificial Sequence
  Probe
gtttccgtagtgtagcggt

SEQ ID NO: 43519 - DNA, 23 bp, Artificial Sequence
  Probe
gtttccgtagtgtagcggttatc

SEQ ID NO: 43520 - DNA, 28 bp, Artificial Sequence
  Probe
gtttccgtagtgtagcggttatcacatt

SEQ ID NO: 43521 - DNA, 29 bp, Artificial Sequence
  Probe
gtttccgtagtgtagcggttatcacattc

SEQ ID NO: 43522 - DNA, 30 bp, Artificial Sequence; identical to SEQ ID NO: 8769
  Probe

SEQ ID NO: 43523 - DNA, 31 bp, Artificial Sequence; identical to SEQ ID NO: 1547
  Probe

SEQ ID NO: 43524 - DNA, 32 bp, Artificial Sequence; identical to SEQ ID NO: 1548
  Probe

SEQ ID NO: 43525 - DNA, 33 bp, Artificial Sequence; identical to SEQ ID NO: 1549
  Probe

SEQ ID NO: 43526 - DNA, 34 bp, Artificial Sequence; identical to SEQ ID NO: 1550
  Probe

SEQ ID NO: 43527 - DNA, 35 bp, Artificial Sequence; identical to SEQ ID NO: 1551
  Probe

SEQ ID NO: 43528 - DNA, 36 bp, Artificial Sequence; identical to SEQ ID NO: 1552
  Probe

SEQ ID NO: 43529 - DNA, 50 bp, Artificial Sequence; identical to SEQ ID NO: 7255
  Probe

SEQ ID NO: 43530 - DNA, 23 bp, Artificial Sequence
  Probe
gtttccgtagtgtagtggtcatc

SEQ ID NO: 43531 - DNA, 28 bp, Artificial Sequence
  Probe
gtttccgtagtgtagtggtcatcacgtt

SEQ ID NO: 43532 - DNA, 30 bp, Artificial Sequence; identical to SEQ ID NO: 8772
  Probe

SEQ ID NO: 43533 - DNA, 31 bp, Artificial Sequence; identical to SEQ ID NO: 1559
  Probe

SEQ ID NO: 43534 - DNA, 32 bp, Artificial Sequence; identical to SEQ ID NO: 1560
  Probe

SEQ ID NO: 43535 - DNA, 33 bp, Artificial Sequence; identical to SEQ ID NO: 1561
  Probe

SEQ ID NO: 43536 - DNA, 34 bp, Artificial Sequence; identical to SEQ ID NO: 1562
  Probe

SEQ ID NO: 43537 - DNA, 38 bp, Artificial Sequence; identical to SEQ ID NO: 1563
  Probe

SEQ ID NO: 43538 - DNA, 50 bp, Artificial Sequence; identical to SEQ ID NO: 1564
  Probe

SEQ ID NO: 43539 - DNA, 31 bp, Artificial Sequence; identical to SEQ ID NO: 23137
  Probe

SEQ ID NO: 43540 - DNA, 23 bp, Artificial Sequence
  Probe
gtttccgtagtgtagtggttatt

SEQ ID NO: 43541 - DNA, 22 bp, Artificial Sequence
  Probe
gtttgtgggtttaagtcccatt

SEQ ID NO: 43542 - DNA, 26 bp, Artificial Sequence
  Probe
gtttgtgggtttaagtcccattggtc

SEQ ID NO: 43543 - DNA, 27 bp, Artificial Sequence
  Probe
gtttgtgggtttaagtcccattggtct

SEQ ID NO: 43544 - DNA, 31 bp, Artificial Sequence; identical to SEQ ID NO: 23173
  Probe

SEQ ID NO: 43545 - DNA, 32 bp, Artificial Sequence; identical to SEQ ID NO: 25624
  Probe

SEQ ID NO: 43546 - DNA, 41 bp, Artificial Sequence; identical to SEQ ID NO: 33586
  Probe

SEQ ID NO: 43547 - DNA, 43 bp, Artificial Sequence; identical to SEQ ID NO: 7306
  Probe

SEQ ID NO: 43548 - DNA, 50 bp, Artificial Sequence; identical to SEQ ID NO: 1568
  Probe

SEQ ID NO: 43549 - DNA, 50 bp, Artificial Sequence; identical to SEQ ID NO: 1569
  Probe

SEQ ID NO: 43550 - DNA, 27 bp, Artificial Sequence
  Probe
taagtgtttgtgggtttaagtcccatt

SEQ ID NO: 43551 - DNA, 31 bp, Artificial Sequence; identical to SEQ ID NO: 7456
  Probe

SEQ ID NO: 43552 - DNA, 32 bp, Artificial Sequence; identical to SEQ ID NO: 7457
  Probe

SEQ ID NO: 43553 - DNA, 33 bp, Artificial Sequence; identical to SEQ ID NO: 7518
  Probe

SEQ ID NO: 43554 - DNA, 34 bp, Artificial Sequence; identical to SEQ ID NO: 14167
  Probe

SEQ ID NO: 43555 - DNA, 35 bp, Artificial Sequence; identical to SEQ ID NO: 1576
  Probe

SEQ ID NO: 43556 - DNA, 36 bp, Artificial Sequence; identical to SEQ ID NO: 1577
  Probe

SEQ ID NO: 43557 - DNA, 32 bp, Artificial Sequence; identical to SEQ ID NO: 7522
  Probe

SEQ ID NO: 43558 - DNA, 18 bp, Artificial Sequence
  Probe
tacctcctcaaagcaata

SEQ ID NO: 43559 - DNA, 22 bp, Artificial Sequence
  Probe
tacctcctcaaagcaatacact

SEQ ID NO: 43560 - DNA, 50 bp, Artificial Sequence; identical to SEQ ID NO: 1582
  Probe

SEQ ID NO: 43561 - DNA, 50 bp, Artificial Sequence; identical to SEQ ID NO: 7558
  Probe

SEQ ID NO: 43562 - DNA, 50 bp, Artificial Sequence; identical to SEQ ID NO: 1583
  Probe

SEQ ID NO: 43563 - DNA, 36 bp, Artificial Sequence; identical to SEQ ID NO: 1584
  Probe

SEQ ID NO: 43564 - DNA, 37 bp, Artificial Sequence; identical to SEQ ID NO: 7559
  Probe

SEQ ID NO: 43565 - DNA, 42 bp, Artificial Sequence; identical to SEQ ID NO: 23472
  Probe

SEQ ID NO: 43566 - DNA, 29 bp, Artificial Sequence
  Probe
taggatggggtgtgataggtggcacggag

SEQ ID NO: 43567 - DNA, 30 bp, Artificial Sequence; identical to SEQ ID NO: 1592
  Probe

SEQ ID NO: 43568 - DNA, 50 bp, Artificial Sequence; identical to SEQ ID NO: 1596
  Probe

SEQ ID NO: 43569 - DNA, 19 bp, Artificial Sequence
  Probe
tagtggttaggattcggcg

SEQ ID NO: 43570 - DNA, 37 bp, Artificial Sequence; identical to SEQ ID NO: 14220
  Probe

SEQ ID NO: 43571 - DNA, 19 bp, Artificial Sequence
  Probe
tagtggttagtactctgcg

SEQ ID NO: 43572 - DNA, 27 bp, Artificial Sequence
  Probe
tatcattggtcgtggttgtagtccgtg

SEQ ID NO: 43573 - DNA, 29 bp, Artificial Sequence
  Probe
tatcattggtcgtggttgtagtccgtgcg

SEQ ID NO: 43574 - DNA, 31 bp, Artificial Sequence; identical to SEQ ID NO: 23604
  Probe

SEQ ID NO: 43575 - DNA, 32 bp, Artificial Sequence; identical to SEQ ID NO: 23605
  Probe

SEQ ID NO: 43576 - DNA, 19 bp, Artificial Sequence
  Probe
tcaaatctcggtggaacct

SEQ ID NO: 43577 - DNA, 22 bp, Artificial Sequence
  Probe
tcaatccccggcacctccacca

SEQ ID NO: 43578 - DNA, 50 bp, Artificial Sequence; identical to SEQ ID NO: 1610
  Probe

SEQ ID NO: 43579 - DNA, 22 bp, Artificial Sequence
  Probe
tcacacgcgaaaggtccccggt

SEQ ID NO: 43580 - DNA, 34 bp, Artificial Sequence; identical to SEQ ID NO: 1615
  Probe

SEQ ID NO: 43581 - DNA, 36 bp, Artificial Sequence; identical to SEQ ID NO: 1616
  Probe

SEQ ID NO: 43582 - DNA, 37 bp, Artificial Sequence; identical to SEQ ID NO: 7688
  Probe

SEQ ID NO: 43583 - DNA, 38 bp, Artificial Sequence; identical to SEQ ID NO: 1617
  Probe

SEQ ID NO: 43584 - DNA, 33 bp, Artificial Sequence; identical to SEQ ID NO: 1619
  Probe

SEQ ID NO: 43585 - DNA, 34 bp, Artificial Sequence; identical to SEQ ID NO: 1620
  Probe

SEQ ID NO: 43586 - DNA, 35 bp, Artificial Sequence; identical to SEQ ID NO: 1621
  Probe

SEQ ID NO: 43587 - DNA, 36 bp, Artificial Sequence; identical to SEQ ID NO: 1622
  Probe

SEQ ID NO: 43588 - DNA, 37 bp, Artificial Sequence; identical to SEQ ID NO: 7698
  Probe

SEQ ID NO: 43589 - DNA, 38 bp, Artificial Sequence; identical to SEQ ID NO: 1623
  Probe

SEQ ID NO: 43590 - DNA, 50 bp, Artificial Sequence; identical to SEQ ID NO: 7743
  Probe

SEQ ID NO: 43591 - DNA, 24 bp, Artificial Sequence
  Probe
tcagggatgggttcgattctcata

SEQ ID NO: 43592 - DNA, 26 bp, Artificial Sequence
  Probe
tcagggatgggttcgattctcatagt

SEQ ID NO: 43593 - DNA, 27 bp, Artificial Sequence
  Probe
tcagggatgggttcgattctcatagtc

SEQ ID NO: 43594 - DNA, 29 bp, Artificial Sequence
  Probe
tcagggatgggttcgattctcatagtcct

SEQ ID NO: 43595 - DNA, 31 bp, Artificial Sequence; identical to SEQ ID NO: 7745
  Probe

SEQ ID NO: 43596 - DNA, 25 bp, Artificial Sequence
  Probe
tcattggtcgtggttgtagtccgtg

SEQ ID NO: 43597 - DNA, 27 bp, Artificial Sequence
  Probe
tcattggtcgtggttgtagtccgtgcg

SEQ ID NO: 43598 - DNA, 29 bp, Artificial Sequence
  Probe
tcattggtcgtggttgtagtccgtgcgag

SEQ ID NO: 43599 - DNA, 34 bp, Artificial Sequence; identical to SEQ ID NO: 1627
  Probe

SEQ ID NO: 43600 - DNA, 33 bp, Artificial Sequence; identical to SEQ ID NO: 23792
  Probe

SEQ ID NO: 43601 - DNA, 34 bp, Artificial Sequence; identical to SEQ ID NO: 1628
  Probe

SEQ ID NO: 43602 - DNA, 25 bp, Artificial Sequence
  Probe
tccagggttcaagtccctgttcggg

SEQ ID NO: 43603 - DNA, 27 bp, Artificial Sequence
  Probe
tccagggttcaagtccctgttcgggcg

SEQ ID NO: 43604 - DNA, 25 bp, Artificial Sequence
  Probe
tccattggggtttccccgcgcaggt

SEQ ID NO: 43605 - DNA, 18 bp, Artificial Sequence
  Probe
tcccacatggtctagcgg

SEQ ID NO: 43606 - DNA, 19 bp, Artificial Sequence
  Probe
tcccacatggtctagcggt

SEQ ID NO: 43607 - DNA, 22 bp, Artificial Sequence
  Probe
tcccacatggtctagcggttag

SEQ ID NO: 43608 - DNA, 23 bp, Artificial Sequence
  Probe
tcccacatggtctagcggttagg

SEQ ID NO: 43609 - DNA, 24 bp, Artificial Sequence
  Probe
tcccacatggtctagcggttagga

SEQ ID NO: 43610 - DNA, 26 bp, Artificial Sequence
  Probe
tcccacatggtctagcggttaggatt

SEQ ID NO: 43611 - DNA, 27 bp, Artificial Sequence
  Probe
tcccacatggtctagcggttaggattc

SEQ ID NO: 43612 - DNA, 28 bp, Artificial Sequence
  Probe
tcccacatggtctagcggttaggattcc

SEQ ID NO: 43613 - DNA, 29 bp, Artificial Sequence
  Probe
tcccacatggtctagcggttaggattcct

SEQ ID NO: 43614 - DNA, 30 bp, Artificial Sequence; identical to SEQ ID NO: 1643
  Probe

SEQ ID NO: 43615 - DNA, 31 bp, Artificial Sequence; identical to SEQ ID NO: 1644
  Probe

SEQ ID NO: 43616 - DNA, 32 bp, Artificial Sequence; identical to SEQ ID NO: 1645
  Probe

SEQ ID NO: 43617 - DNA, 33 bp, Artificial Sequence; identical to SEQ ID NO: 1646
  Probe

SEQ ID NO: 43618 - DNA, 34 bp, Artificial Sequence; identical to SEQ ID NO: 1647
  Probe

SEQ ID NO: 43619 - DNA, 35 bp, Artificial Sequence; identical to SEQ ID NO: 1648
  Probe

SEQ ID NO: 43620 - DNA, 36 bp, Artificial Sequence; identical to SEQ ID NO: 1649
  Probe

SEQ ID NO: 43621 - DNA, 37 bp, Artificial Sequence; identical to SEQ ID NO: 1650
  Probe

SEQ ID NO: 43622 - DNA, 39 bp, Artificial Sequence; identical to SEQ ID NO: 7795
  Probe

SEQ ID NO: 43623 - DNA, 40 bp, Artificial Sequence; identical to SEQ ID NO: 1651
  Probe

SEQ ID NO: 43624 - DNA, 41 bp, Artificial Sequence; identical to SEQ ID NO: 7796
  Probe

SEQ ID NO: 43625 - DNA, 50 bp, Artificial Sequence; identical to SEQ ID NO: 7798
  Probe

SEQ ID NO: 43626 - DNA, 18 bp, Artificial Sequence
  Probe
tcccatatggtctagcgg

SEQ ID NO: 43627 - DNA, 19 bp, Artificial Sequence
  Probe
tcccatatggtctagcggt

SEQ ID NO: 43628 - DNA, 23 bp, Artificial Sequence
  Probe
tcccatatggtctagcggttagg

SEQ ID NO: 43629 - DNA, 26 bp, Artificial Sequence
  Probe
tcccatatggtctagcggttaggatt

SEQ ID NO: 43630 - DNA, 29 bp, Artificial Sequence
  Probe
tcccatatggtctagcggttaggattcct

SEQ ID NO: 43631 - DNA, 30 bp, Artificial Sequence; identical to SEQ ID NO: 1659
  Probe

SEQ ID NO: 43632 - DNA, 31 bp, Artificial Sequence; identical to SEQ ID NO: 1660
  Probe

SEQ ID NO: 43633 - DNA, 32 bp, Artificial Sequence; identical to SEQ ID NO: 1661
  Probe

SEQ ID NO: 43634 - DNA, 33 bp, Artificial Sequence; identical to SEQ ID NO: 1662
  Probe

SEQ ID NO: 43635 - DNA, 34 bp, Artificial Sequence; identical to SEQ ID NO: 1663
  Probe

SEQ ID NO: 43636 - DNA, 35 bp, Artificial Sequence; identical to SEQ ID NO: 1664
  Probe

SEQ ID NO: 43637 - DNA, 36 bp, Artificial Sequence; identical to SEQ ID NO: 1665
  Probe

SEQ ID NO: 43638 - DNA, 40 bp, Artificial Sequence; identical to SEQ ID NO: 7804
  Probe

SEQ ID NO: 43639 - DNA, 16 bp, Artificial Sequence
  Probe
tccccggcacctccac

SEQ ID NO: 43640 - DNA, 17 bp, Artificial Sequence
  Probe
tccccggcacctccacc

SEQ ID NO: 43641 - DNA, 18 bp, Artificial Sequence
  Probe
tccccggcacctccacca

SEQ ID NO: 43642 - DNA, 27 bp, Artificial Sequence
  Probe
tcccgggttcgatccccagcatctcca

SEQ ID NO: 43643 - DNA, 31 bp, Artificial Sequence; identical to SEQ ID NO: 1671
  Probe

SEQ ID NO: 43644 - DNA, 32 bp, Artificial Sequence; identical to SEQ ID NO: 1672
  Probe

SEQ ID NO: 43645 - DNA, 33 bp, Artificial Sequence; identical to SEQ ID NO: 1673
  Probe

SEQ ID NO: 43646 - DNA, 34 bp, Artificial Sequence; identical to SEQ ID NO: 1674
  Probe

SEQ ID NO: 43647 - DNA, 35 bp, Artificial Sequence; identical to SEQ ID NO: 1675
  Probe

SEQ ID NO: 43648 - DNA, 36 bp, Artificial Sequence; identical to SEQ ID NO: 1676
  Probe

SEQ ID NO: 43649 - DNA, 31 bp, Artificial Sequence; identical to SEQ ID NO: 1679
  Probe

SEQ ID NO: 43650 - DNA, 32 bp, Artificial Sequence; identical to SEQ ID NO: 1680
  Probe

SEQ ID NO: 43651 - DNA, 33 bp, Artificial Sequence; identical to SEQ ID NO: 1681
  Probe

SEQ ID NO: 43652 - DNA, 34 bp, Artificial Sequence; identical to SEQ ID NO: 1682
  Probe

SEQ ID NO: 43653 - DNA, 35 bp, Artificial Sequence; identical to SEQ ID NO: 1683
  Probe

SEQ ID NO: 43654 - DNA, 36 bp, Artificial Sequence; identical to SEQ ID NO: 1684
  Probe

SEQ ID NO: 43655 - DNA, 37 bp, Artificial Sequence; identical to SEQ ID NO: 1685
  Probe

SEQ ID NO: 43656 - DNA, 39 bp, Artificial Sequence; identical to SEQ ID NO: 1687
  Probe

SEQ ID NO: 43657 - DNA, 40 bp, Artificial Sequence; identical to SEQ ID NO: 1688
  Probe

SEQ ID NO: 43658 - DNA, 49 bp, Artificial Sequence; identical to SEQ ID NO: 1690
  Probe

SEQ ID NO: 43659 - DNA, 50 bp, Artificial Sequence; identical to SEQ ID NO: 1691
  Probe

SEQ ID NO: 43660 - DNA, 25 bp, Artificial Sequence
  Probe
tccctggttcgatcccgggtttcgg

SEQ ID NO: 43661 - DNA, 27 bp, Artificial Sequence
  Probe
tccctggttcgatcccgggtttcggca

SEQ ID NO: 43662 - DNA, 28 bp, Artificial Sequence
  Probe
tccgtagtgtagtggtcatcacgttcgc

SEQ ID NO: 43663 - DNA, 22 bp, Artificial Sequence
  Probe
tcctcgttagtatagtggtgag

SEQ ID NO: 43664 - DNA, 23 bp, Artificial Sequence
  Probe
tcctcgttagtatagtggtgagt

SEQ ID NO: 43665 - DNA, 28 bp, Artificial Sequence
  Probe
tcctcgttagtatagtggtgagtatccc

SEQ ID NO: 43666 - DNA, 30 bp, Artificial Sequence; identical to SEQ ID NO: 1701
  Probe

SEQ ID NO: 43667 - DNA, 31 bp, Artificial Sequence; identical to SEQ ID NO: 1702
  Probe

SEQ ID NO: 43668 - DNA, 32 bp, Artificial Sequence; identical to SEQ ID NO: 1703
  Probe

SEQ ID NO: 43669 - DNA, 33 bp, Artificial Sequence; identical to SEQ ID NO: 1704
  Probe

SEQ ID NO: 43670 - DNA, 34 bp, Artificial Sequence; identical to SEQ ID NO: 1705
  Probe

SEQ ID NO: 43671 - DNA, 35 bp, Artificial Sequence; identical to SEQ ID NO: 1706
  Probe

SEQ ID NO: 43672 - DNA, 36 bp, Artificial Sequence; identical to SEQ ID NO: 1707
  Probe

SEQ ID NO: 43673 - DNA, 37 bp, Artificial Sequence; identical to SEQ ID NO: 1708
  Probe

SEQ ID NO: 43674 - DNA, 50 bp, Artificial Sequence; identical to SEQ ID NO: 1711
  Probe

SEQ ID NO: 43675 - DNA, 28 bp, Artificial Sequence
  Probe
tcctcgttagtatagtggttagtatccc

SEQ ID NO: 43676 - DNA, 32 bp, Artificial Sequence; identical to SEQ ID NO: 1714
  Probe

SEQ ID NO: 43677 - DNA, 33 bp, Artificial Sequence; identical to SEQ ID NO: 1715
  Probe

SEQ ID NO: 43678 - DNA, 34 bp, Artificial Sequence; identical to SEQ ID NO: 1716
  Probe

SEQ ID NO: 43679 - DNA, 35 bp, Artificial Sequence; identical to SEQ ID NO: 1717
  Probe

SEQ ID NO: 43680 - DNA, 36 bp, Artificial Sequence; identical to SEQ ID NO: 1718
  Probe

SEQ ID NO: 43681 - DNA, 19 bp, Artificial Sequence
  Probe
tcgaatccgagtcacggca

SEQ ID NO: 43682 - DNA, 20 bp, Artificial Sequence
  Probe
tcgactcccggtgtgggaac

SEQ ID NO: 43683 - DNA, 19 bp, Artificial Sequence
  Probe
tcgatgcccgcatcctcca

SEQ ID NO: 43684 - DNA, 28 bp, Artificial Sequence
  Probe
tcgcataaaacttaaaactttacagtca

SEQ ID NO: 43685 - DNA, 30 bp, Artificial Sequence; identical to SEQ ID NO: 24087
  Probe

SEQ ID NO: 43686 - DNA, 22 bp, Artificial Sequence
  Probe
tgaatccagcgatccgagttca

SEQ ID NO: 43687 - DNA, 32 bp, Artificial Sequence; identical to SEQ ID NO: 1736
  Probe

SEQ ID NO: 43688 - DNA, 34 bp, Artificial Sequence; identical to SEQ ID NO: 1738
  Probe

SEQ ID NO: 43689 - DNA, 37 bp, Artificial Sequence; identical to SEQ ID NO: 1741
  Probe

SEQ ID NO: 43690 - DNA, 38 bp, Artificial Sequence; identical to SEQ ID NO: 1742
  Probe

SEQ ID NO: 43691 - DNA, 32 bp, Artificial Sequence; identical to SEQ ID NO: 1745
  Probe

SEQ ID NO: 43692 - DNA, 27 bp, Artificial Sequence
  Probe
tgacccgggttcgattcccggccaacg

SEQ ID NO: 43693 - DNA, 26 bp, Artificial Sequence
  Probe
tgagggttcgagtcccttcgtggtcg

SEQ ID NO: 43694 - DNA, 31 bp, Artificial Sequence; identical to SEQ ID NO: 8157
  Probe

SEQ ID NO: 43695 - DNA, 21 bp, Artificial Sequence
  Probe
tggtcgtggttgtagtccgtg

SEQ ID NO: 43696 - DNA, 23 bp, Artificial Sequence
  Probe
tggtcgtggttgtagtccgtgcg

SEQ ID NO: 43697 - DNA, 25 bp, Artificial Sequence
  Probe
tggtcgtggttgtagtccgtgcgag

SEQ ID NO: 43698 - DNA, 26 bp, Artificial Sequence
  Probe
tggtcgtggttgtagtccgtgcgaga

SEQ ID NO: 43699 - DNA, 27 bp, Artificial Sequence
  Probe
tggtcgtggttgtagtccgtgcgagaa

SEQ ID NO: 43700 - DNA, 17 bp, Artificial Sequence
  Probe
tggttaggattcggcgc

SEQ ID NO: 43701 - DNA, 17 bp, Artificial Sequence
  Probe
tggttagtactctgcgt

SEQ ID NO: 43702 - DNA, 19 bp, Artificial Sequence
  Probe
tggttgtagtccgtgcgag

SEQ ID NO: 43703 - DNA, 18 bp, Artificial Sequence
  Probe
tgtagcggttatcacatt

SEQ ID NO: 43704 - DNA, 23 bp, Artificial Sequence
  Probe
tgtagcggttatcacattcgcct

SEQ ID NO: 43705 - DNA, 21 bp, Artificial Sequence
  Probe
tgtcacgcgggagaccggggt

SEQ ID NO: 43706 - DNA, 36 bp, Artificial Sequence; identical to SEQ ID NO: 14453
  Probe

SEQ ID NO: 43707 - DNA, 37 bp, Artificial Sequence; identical to SEQ ID NO: 14454
  Probe

SEQ ID NO: 43708 - DNA, 38 bp, Artificial Sequence; identical to SEQ ID NO: 14455
  Probe

SEQ ID NO: 43709 - DNA, 40 bp, Artificial Sequence; identical to SEQ ID NO: 1782
  Probe

SEQ ID NO: 43710 - DNA, 26 bp, Artificial Sequence
  Probe
tgtgagttcgagcctcacctggagca

SEQ ID NO: 43711 - DNA, 27 bp, Artificial Sequence
  Probe
tgtttgtgggtttaagtcccattggtc

SEQ ID NO: 43712 - DNA, 28 bp, Artificial Sequence
  Probe
tgtttgtgggtttaagtcccattggtct

SEQ ID NO: 43713 - DNA, 37 bp, Artificial Sequence; identical to SEQ ID NO: 1786
  Probe

SEQ ID NO: 43714 - DNA, 36 bp, Artificial Sequence; identical to SEQ ID NO: 1789
  Probe

SEQ ID NO: 43715 - DNA, 37 bp, Artificial Sequence; identical to SEQ ID NO: 1790
  Probe

SEQ ID NO: 43716 - DNA, 38 bp, Artificial Sequence; identical to SEQ ID NO: 1791
  Probe

SEQ ID NO: 43717 - DNA, 38 bp, Artificial Sequence; identical to SEQ ID NO: 24607
  Probe

SEQ ID NO: 43718 - DNA, 39 bp, Artificial Sequence; identical to SEQ ID NO: 8348
  Probe

SEQ ID NO: 43719 - DNA, 23 bp, Artificial Sequence
  Probe
ttcaatccccggcacctccacca

SEQ ID NO: 43720 - DNA, 35 bp, Artificial Sequence; identical to SEQ ID NO: 1796
  Probe

SEQ ID NO: 43721 - DNA, 18 bp, Artificial Sequence
  Probe
ttcccattcttgcgaccc

SEQ ID NO: 43722 - DNA, 25 bp, Artificial Sequence
  Probe
aaaaattttggtgcaactccaaata

SEQ ID NO: 43723 - DNA, 25 bp, Artificial Sequence
  Probe
aaaacatcagattgtgaatctgaca

SEQ ID NO: 43724 - DNA, 28 bp, Artificial Sequence
  Probe
aaaacatcagattgtgaatctgacaaca

SEQ ID NO: 43725 - DNA, 29 bp, Artificial Sequence
  Probe
aaaacatcagattgtgaatctgacaacag

SEQ ID NO: 43726 - DNA, 30 bp, Artificial Sequence; identical to SEQ ID NO: 25958
  Probe

SEQ ID NO: 43727 - DNA, 42 bp, Artificial Sequence; identical to SEQ ID NO: 14481
  Probe

SEQ ID NO: 43728 - DNA, 43 bp, Artificial Sequence; identical to SEQ ID NO: 1
  Probe

SEQ ID NO: 43729 - DNA, 49 bp, Artificial Sequence; identical to SEQ ID NO: 1812
  Probe

SEQ ID NO: 43730 - DNA, 23 bp, Artificial Sequence
  Probe
aaaacctttttccaaggacaaat

SEQ ID NO: 43731 - DNA, 50 bp, Artificial Sequence; identical to SEQ ID NO: 1818
  Probe

SEQ ID NO: 43732 - DNA, 39 bp, Artificial Sequence; identical to SEQ ID NO: 6
  Probe

SEQ ID NO: 43733 - DNA, 40 bp, Artificial Sequence; identical to SEQ ID NO: 7
  Probe

SEQ ID NO: 43734 - DNA, 41 bp, Artificial Sequence; identical to SEQ ID NO: 1823
  Probe

SEQ ID NO: 43735 - DNA, 42 bp, Artificial Sequence; identical to SEQ ID NO: 1824
  Probe

SEQ ID NO: 43736 - DNA, 43 bp, Artificial Sequence; identical to SEQ ID NO: 1825
  Probe

SEQ ID NO: 43737 - DNA, 44 bp, Artificial Sequence; identical to SEQ ID NO: 1826
  Probe

SEQ ID NO: 43738 - DNA, 45 bp, Artificial Sequence; identical to SEQ ID NO: 1827
  Probe

SEQ ID NO: 43739 - DNA, 46 bp, Artificial Sequence; identical to SEQ ID NO: 1828
  Probe

SEQ ID NO: 43740 - DNA, 50 bp, Artificial Sequence; identical to SEQ ID NO: 1830
  Probe

SEQ ID NO: 43741 - DNA, 33 bp, Artificial Sequence; identical to SEQ ID NO: 9
  Probe

SEQ ID NO: 43742 - DNA, 38 bp, Artificial Sequence; identical to SEQ ID NO: 1833
  Probe

SEQ ID NO: 43743 - DNA, 40 bp, Artificial Sequence; identical to SEQ ID NO: 1835
  Probe

SEQ ID NO: 43744 - DNA, 42 bp, Artificial Sequence; identical to SEQ ID NO: 1837
  Probe

SEQ ID NO: 43745 - DNA, 50 bp, Artificial Sequence; identical to SEQ ID NO: 1838
  Probe

SEQ ID NO: 43746 - DNA, 30 bp, Artificial Sequence
  Probe
aaaatgtttagacgggctcacatcacccca

SEQ ID NO: 43747 - DNA, 32 bp, Artificial Sequence; identical to SEQ ID NO: 25996
  Probe

SEQ ID NO: 43748 - DNA, 37 bp, Artificial Sequence
  Probe
aaaatgtttagacgggctcacatcaccccataaacaa

SEQ ID NO: 43749 - DNA, 38 bp, Artificial Sequence; identical to SEQ ID NO: 14509
  Probe

SEQ ID NO: 43750 - DNA, 39 bp, Artificial Sequence; identical to SEQ ID NO: 1841
  Probe

SEQ ID NO: 43751 - DNA, 40 bp, Artificial Sequence; identical to SEQ ID NO: 1842
  Probe

SEQ ID NO: 43752 - DNA, 41 bp, Artificial Sequence; identical to SEQ ID NO: 14512
  Probe

SEQ ID NO: 43753 - DNA, 50 bp, Artificial Sequence; identical to SEQ ID NO: 1846
  Probe

SEQ ID NO: 43754 - DNA, 24 bp, Artificial Sequence
  Probe
aaacatcagattgtgaatctgaca

SEQ ID NO: 43755 - DNA, 26 bp, Artificial Sequence
  Probe
aaacatcagattgtgaatctgacaac

SEQ ID NO: 43756 - DNA, 27 bp, Artificial Sequence
  Probe
aaacatcagattgtgaatctgacaaca

SEQ ID NO: 43757 - DNA, 28 bp, Artificial Sequence
  Probe
aaacatcagattgtgaatctgacaacag

SEQ ID NO: 43758 - DNA, 29 bp, Artificial Sequence
  Probe
aaacatcagattgtgaatctgacaacaga

SEQ ID NO: 43759 - DNA, 30 bp, Artificial Sequence; identical to SEQ ID NO: 8867
  Probe

SEQ ID NO: 43760 - DNA, 31 bp, Artificial Sequence; identical to SEQ ID NO: 26009
  Probe

SEQ ID NO: 43761 - DNA, 37 bp, Artificial Sequence; identical to SEQ ID NO: 14525
  Probe

SEQ ID NO: 43762 - DNA, 38 bp, Artificial Sequence; identical to SEQ ID NO: 14526
  Probe

SEQ ID NO: 43763 - DNA, 41 bp, Artificial Sequence; identical to SEQ ID NO: 24849
  Probe

SEQ ID NO: 43764 - DNA, 42 bp, Artificial Sequence; identical to SEQ ID NO: 14527
  Probe

SEQ ID NO: 43765 - DNA, 44 bp, Artificial Sequence; identical to SEQ ID NO: 12
  Probe

SEQ ID NO: 43766 - DNA, 45 bp, Artificial Sequence; identical to SEQ ID NO: 13
  Probe

SEQ ID NO: 43767 - DNA, 16 bp, Artificial Sequence
  Probe
aaaccatttcataact

SEQ ID NO: 43768 - DNA, 21 bp, Artificial Sequence
  Probe
aaaccatttcataactttgtc

SEQ ID NO: 43769 - DNA, 24 bp, Artificial Sequence
  Probe
aaaccatttcataactttgtcaaa

SEQ ID NO: 43770 - DNA, 25 bp, Artificial Sequence
  Probe
aaaccatttcataactttgtcaaag

SEQ ID NO: 43771 - DNA, 26 bp, Artificial Sequence
  Probe
aaaccatttcataactttgtcaaagt

SEQ ID NO: 43772 - DNA, 28 bp, Artificial Sequence
  Probe
aaaccatttcataactttgtcaaagtta

SEQ ID NO: 43773 - DNA, 30 bp, Artificial Sequence; identical to SEQ ID NO: 1865
  Probe

SEQ ID NO: 43774 - DNA, 45 bp, Artificial Sequence; identical to SEQ ID NO: 1868
  Probe

SEQ ID NO: 43775 - DNA, 46 bp, Artificial Sequence; identical to SEQ ID NO: 1869
  Probe

SEQ ID NO: 43776 - DNA, 49 bp, Artificial Sequence; identical to SEQ ID NO: 1870
  Probe

SEQ ID NO: 43777 - DNA, 50 bp, Artificial Sequence; identical to SEQ ID NO: 1871
  Probe

SEQ ID NO: 43778 - DNA, 19 bp, Artificial Sequence
  Probe
aaacccccttatttctagg

SEQ ID NO: 43779 - DNA, 32 bp, Artificial Sequence; identical to SEQ ID NO: 15
  Probe

SEQ ID NO: 43780 - DNA, 34 bp, Artificial Sequence; identical to SEQ ID NO: 1875
  Probe

SEQ ID NO: 43781 - DNA, 35 bp, Artificial Sequence; identical to SEQ ID NO: 1876
  Probe

SEQ ID NO: 43782 - DNA, 19 bp, Artificial Sequence
  Probe
aaaccgggcggaaacacct

SEQ ID NO: 43783 - DNA, 20 bp, Artificial Sequence
  Probe
aaaccgggcggaaacacgtt

SEQ ID NO: 43784 - DNA, 20 bp, Artificial Sequence
  Probe
aaaccgggcggaaacaggta

SEQ ID NO: 43785 - DNA, 18 bp, Artificial Sequence
  Probe
aaacctagccccaaaccc

SEQ ID NO: 43786 - DNA, 24 bp, Artificial Sequence
  Probe
aaacctagccccaaacccactcca

SEQ ID NO: 43787 - DNA, 26 bp, Artificial Sequence
  Probe
aaacctagccccaaacccactccacc

SEQ ID NO: 43788 - DNA, 27 bp, Artificial Sequence
  Probe
aaacctagccccaaacccactccacct

SEQ ID NO: 43789 - DNA, 28 bp, Artificial Sequence
  Probe
aaacctgccggggcttctcccgcctttt

SEQ ID NO: 43790 - DNA, 33 bp, Artificial Sequence; identical to SEQ ID NO: 14551
  Probe

SEQ ID NO: 43791 - DNA, 45 bp, Artificial Sequence; identical to SEQ ID NO: 1883
  Probe

SEQ ID NO: 43792 - DNA, 49 bp, Artificial Sequence; identical to SEQ ID NO: 1884
  Probe

SEQ ID NO: 43793 - DNA, 50 bp, Artificial Sequence; identical to SEQ ID NO: 1885
  Probe

SEQ ID NO: 43794 - DNA, 40 bp, Artificial Sequence; identical to SEQ ID NO: 1886
  Probe

SEQ ID NO: 43795 - DNA, 43 bp, Artificial Sequence
  Probe
aaacttaaaactttacagtcagaggttcaattcctcttcttaa

SEQ ID NO: 43796 - DNA, 44 bp, Artificial Sequence; identical to SEQ ID NO: 1888
  Probe

SEQ ID NO: 43797 - DNA, 50 bp, Artificial Sequence; identical to SEQ ID NO: 1890
  Probe

SEQ ID NO: 43798 - DNA, 32 bp, Artificial Sequence; identical to SEQ ID NO: 17
  Probe

SEQ ID NO: 43799 - DNA, 35 bp, Artificial Sequence; identical to SEQ ID NO: 1894
  Probe

SEQ ID NO: 43800 - DNA, 38 bp, Artificial Sequence; identical to SEQ ID NO: 1895
  Probe

SEQ ID NO: 43801 - DNA, 40 bp, Artificial Sequence; identical to SEQ ID NO: 1897
  Probe

SEQ ID NO: 43802 - DNA, 41 bp, Artificial Sequence; identical to SEQ ID NO: 1898
  Probe

SEQ ID NO: 43803 - DNA, 16 bp, Artificial Sequence
  Probe
aaagacaccccccaca

SEQ ID NO: 43804 - DNA, 35 bp, Artificial Sequence; identical to SEQ ID NO: 1910
  Probe

SEQ ID NO: 43805 - DNA, 46 bp, Artificial Sequence; identical to SEQ ID NO: 1916
  Probe

SEQ ID NO: 43806 - DNA, 50 bp, Artificial Sequence; identical to SEQ ID NO: 1918
  Probe

SEQ ID NO: 43807 - DNA, 20 bp, Artificial Sequence
  Probe
aaagacaggggttaggcctc

SEQ ID NO: 43808 - DNA, 24 bp, Artificial Sequence
  Probe
aaagacaggggttaggcctctttt

SEQ ID NO: 43809 - DNA, 28 bp, Artificial Sequence
  Probe
aaagacaggggttaggcctctttttacc

SEQ ID NO: 43810 - DNA, 29 bp, Artificial Sequence
  Probe
aaagacaggggttaggcctctttttacca

SEQ ID NO: 43811 - DNA, 31 bp, Artificial Sequence; identical to SEQ ID NO: 1924
  Probe

SEQ ID NO: 43812 - DNA, 32 bp, Artificial Sequence; identical to SEQ ID NO: 1925
  Probe

SEQ ID NO: 43813 - DNA, 50 bp, Artificial Sequence; identical to SEQ ID NO: 14605
  Probe

SEQ ID NO: 43814 - DNA, 32 bp, Artificial Sequence; identical to SEQ ID NO: 14607
  Probe

SEQ ID NO: 43815 - DNA, 33 bp, Artificial Sequence; identical to SEQ ID NO: 1926
  Probe

SEQ ID NO: 43816 - DNA, 34 bp, Artificial Sequence; identical to SEQ ID NO: 1927
  Probe

SEQ ID NO: 43817 - DNA, 35 bp, Artificial Sequence; identical to SEQ ID NO: 1928
  Probe

SEQ ID NO: 43818 - DNA, 36 bp, Artificial Sequence; identical to SEQ ID NO: 1929
  Probe

SEQ ID NO: 43819 - DNA, 37 bp, Artificial Sequence; identical to SEQ ID NO: 1930
  Probe

SEQ ID NO: 43820 - DNA, 44 bp, Artificial Sequence; identical to SEQ ID NO: 22
  Probe

SEQ ID NO: 43821 - DNA, 49 bp, Artificial Sequence; identical to SEQ ID NO: 24
  Probe

SEQ ID NO: 43822 - DNA, 25 bp, Artificial Sequence
  Probe
aaagcacccaacttacacttaggag

SEQ ID NO: 43823 - DNA, 26 bp, Artificial Sequence
  Probe
aaagcacccaacttacacttaggaga

SEQ ID NO: 43824 - DNA, 27 bp, Artificial Sequence
  Probe
aaagcacccaacttacacttaggagat

SEQ ID NO: 43825 - DNA, 31 bp, Artificial Sequence; identical to SEQ ID NO: 1954
  Probe

SEQ ID NO: 43826 - DNA, 44 bp, Artificial Sequence
  Probe
aaagcacccaacttacacttaggagatttcaacttaacttgacc

SEQ ID NO: 43827 - DNA, 45 bp, Artificial Sequence; identical to SEQ ID NO: 1959
  Probe

SEQ ID NO: 43828 - DNA, 50 bp, Artificial Sequence; identical to SEQ ID NO: 1962
  Probe

SEQ ID NO: 43829 - DNA, 50 bp, Artificial Sequence; identical to SEQ ID NO: 1965
  Probe

SEQ ID NO: 43830 - DNA, 25 bp, Artificial Sequence
  Probe
aaagctcacaagaactgctaactca

SEQ ID NO: 43831 - DNA, 27 bp, Artificial Sequence
  Probe
aaagctcacaagaactgctaactcatg

SEQ ID NO: 43832 - DNA, 50 bp, Artificial Sequence; identical to SEQ ID NO: 32
  Probe

SEQ ID NO: 43833 - DNA, 30 bp, Artificial Sequence; identical to SEQ ID NO: 14643
  Probe

SEQ ID NO: 43834 - DNA, 29 bp, Artificial Sequence
  Probe
aaaggttggtggttcgagcccacccaggg

SEQ ID NO: 43835 - DNA, 32 bp, Artificial Sequence; identical to SEQ ID NO: 14644
  Probe

SEQ ID NO: 43836 - DNA, 33 bp, Artificial Sequence
  Probe
aaaggttggtggttcgagcccacccagggacgc

SEQ ID NO: 43837 - DNA, 35 bp, Artificial Sequence; identical to SEQ ID NO: 14646
  Probe

SEQ ID NO: 43838 - DNA, 30 bp, Artificial Sequence; identical to SEQ ID NO: 1972
  Probe

SEQ ID NO: 43839 - DNA, 32 bp, Artificial Sequence; identical to SEQ ID NO: 1973
  Probe

SEQ ID NO: 43840 - DNA, 21 bp, Artificial Sequence
  Probe
aaataagctatcgggcccata

SEQ ID NO: 43841 - DNA, 24 bp, Artificial Sequence
  Probe
aaataagctatcgggcccataccc

SEQ ID NO: 43842 - DNA, 28 bp, Artificial Sequence
  Probe
aaataagctatcgggcccataccccgaa

SEQ ID NO: 43843 - DNA, 29 bp, Artificial Sequence
  Probe
aaataagctatcgggcccataccccgaaa

SEQ ID NO: 43844 - DNA, 30 bp, Artificial Sequence; identical to SEQ ID NO: 1982
  Probe

SEQ ID NO: 43845 - DNA, 31 bp, Artificial Sequence; identical to SEQ ID NO: 1983
  Probe

SEQ ID NO: 43846 - DNA, 32 bp, Artificial Sequence; identical to SEQ ID NO: 1984
  Probe

SEQ ID NO: 43847 - DNA, 37 bp, Artificial Sequence; identical to SEQ ID NO: 14669
  Probe

SEQ ID NO: 43848 - DNA, 50 bp, Artificial Sequence; identical to SEQ ID NO: 1989
  Probe

SEQ ID NO: 43849 - DNA, 32 bp, Artificial Sequence
  Probe
aaataataggagcttaaacccccttatttcta

SEQ ID NO: 43850 - DNA, 45 bp, Artificial Sequence; identical to SEQ ID NO: 26126
  Probe

SEQ ID NO: 43851 - DNA, 50 bp, Artificial Sequence; identical to SEQ ID NO: 26127
  Probe

SEQ ID NO: 43852 - DNA, 20 bp, Artificial Sequence
  Probe
aaatcccggacgagccccct

SEQ ID NO: 43853 - DNA, 20 bp, Artificial Sequence
  Probe
aaatccgggtgccccctcaa

SEQ ID NO: 43854 - DNA, 35 bp, Artificial Sequence; identical to SEQ ID NO: 34
  Probe

SEQ ID NO: 43855 - DNA, 36 bp, Artificial Sequence; identical to SEQ ID NO: 2000
  Probe

SEQ ID NO: 43856 - DNA, 37 bp, Artificial Sequence; identical to SEQ ID NO: 2001
  Probe

SEQ ID NO: 43857 - DNA, 38 bp, Artificial Sequence; identical to SEQ ID NO: 2002
  Probe

SEQ ID NO: 43858 - DNA, 39 bp, Artificial Sequence; identical to SEQ ID NO: 2003
  Probe

SEQ ID NO: 43859 - DNA, 25 bp, Artificial Sequence
  Probe
aaatgttggttatacccttcccgta

SEQ ID NO: 43860 - DNA, 37 bp, Artificial Sequence; identical to SEQ ID NO: 14684
  Probe

SEQ ID NO: 43861 - DNA, 38 bp, Artificial Sequence; identical to SEQ ID NO: 14685
  Probe

SEQ ID NO: 43862 - DNA, 50 bp, Artificial Sequence; identical to SEQ ID NO: 36
  Probe

SEQ ID NO: 43863 - DNA, 38 bp, Artificial Sequence; identical to SEQ ID NO: 2008
  Probe

SEQ ID NO: 43864 - DNA, 39 bp, Artificial Sequence; identical to SEQ ID NO: 2009
  Probe

SEQ ID NO: 43865 - DNA, 49 bp, Artificial Sequence; identical to SEQ ID NO: 2012
  Probe

SEQ ID NO: 43866 - DNA, 50 bp, Artificial Sequence; identical to SEQ ID NO: 2013
  Probe

SEQ ID NO: 43867 - DNA, 20 bp, Artificial Sequence
  Probe
aacaacatggctttctcaac

SEQ ID NO: 43868 - DNA, 16 bp, Artificial Sequence
  Probe
aacacaaagcacccaa

SEQ ID NO: 43869 - DNA, 17 bp, Artificial Sequence
  Probe
aacacaaagcacccaac

SEQ ID NO: 43870 - DNA, 18 bp, Artificial Sequence
  Probe
aacacaaagcacccaact

SEQ ID NO: 43871 - DNA, 19 bp, Artificial Sequence
  Probe
aacacaaagcacccaactt

SEQ ID NO: 43872 - DNA, 20 bp, Artificial Sequence
  Probe
aacacaaagcacccaactta

SEQ ID NO: 43873 - DNA, 22 bp, Artificial Sequence
  Probe
aacacaaagcacccaacttaca

SEQ ID NO: 43874 - DNA, 24 bp, Artificial Sequence
  Probe
aacacaaagcacccaacttacact

SEQ ID NO: 43875 - DNA, 25 bp, Artificial Sequence
  Probe
aacacaaagcacccaacttacactt

SEQ ID NO: 43876 - DNA, 26 bp, Artificial Sequence
  Probe
aacacaaagcacccaacttacactta

SEQ ID NO: 43877 - DNA, 27 bp, Artificial Sequence
  Probe
aacacaaagcacccaacttacacttag

SEQ ID NO: 43878 - DNA, 28 bp, Artificial Sequence
  Probe
aacacaaagcacccaacttacacttagg

SEQ ID NO: 43879 - DNA, 29 bp, Artificial Sequence
  Probe
aacacaaagcacccaacttacacttagga

SEQ ID NO: 43880 - DNA, 30 bp, Artificial Sequence; identical to SEQ ID NO: 2027
  Probe

SEQ ID NO: 43881 - DNA, 31 bp, Artificial Sequence; identical to SEQ ID NO: 2028
  Probe

SEQ ID NO: 43882 - DNA, 32 bp, Artificial Sequence; identical to SEQ ID NO: 2029
  Probe

SEQ ID NO: 43883 - DNA, 33 bp, Artificial Sequence; identical to SEQ ID NO: 2030
  Probe

SEQ ID NO: 43884 - DNA, 35 bp, Artificial Sequence
  Probe
aacacaaagcacccaacttacacttaggagatttc

SEQ ID NO: 43885 - DNA, 36 bp, Artificial Sequence; identical to SEQ ID NO: 2031
  Probe

SEQ ID NO: 43886 - DNA, 38 bp, Artificial Sequence; identical to SEQ ID NO: 2033
  Probe

SEQ ID NO: 43887 - DNA, 40 bp, Artificial Sequence; identical to SEQ ID NO: 2035
  Probe

SEQ ID NO: 43888 - DNA, 41 bp, Artificial Sequence; identical to SEQ ID NO: 37
  Probe

SEQ ID NO: 43889 - DNA, 44 bp, Artificial Sequence
  Probe
aacacaaagcacccaacttacacttaggagatttcaacttaact

SEQ ID NO: 43890 - DNA, 45 bp, Artificial Sequence
  Probe
aacacaaagcacccaacttacacttaggagatttcaacttaactt

SEQ ID NO: 43891 - DNA, 49 bp, Artificial Sequence; identical to SEQ ID NO: 2036
  Probe

SEQ ID NO: 43892 - DNA, 17 bp, Artificial Sequence
  Probe
aacacctctttacagtg

SEQ ID NO: 43893 - DNA, 18 bp, Artificial Sequence
  Probe
aacacctctttacagtga

SEQ ID NO: 43894 - DNA, 19 bp, Artificial Sequence
  Probe
aacacctctttacagtgaa

SEQ ID NO: 43895 - DNA, 20 bp, Artificial Sequence
  Probe
aacacctctttacagtgaaa

SEQ ID NO: 43896 - DNA, 21 bp, Artificial Sequence
  Probe
aacacctctttacagtgaaat

SEQ ID NO: 43897 - DNA, 36 bp, Artificial Sequence
  Probe
aacacgcgaaaggtccccggttcgaaaccgggcgga

SEQ ID NO: 43898 - DNA, 28 bp, Artificial Sequence
  Probe
aacagaggcttacgaccccttatttacc

SEQ ID NO: 43899 - DNA, 29 bp, Artificial Sequence
  Probe
aacagaggcttacgaccccttatttaccg

SEQ ID NO: 43900 - DNA, 31 bp, Artificial Sequence; identical to SEQ ID NO: 2039
  Probe

SEQ ID NO: 43901 - DNA, 17 bp, Artificial Sequence
  Probe
aacagctaaggactgca

SEQ ID NO: 43902 - DNA, 25 bp, Artificial Sequence
  Probe
aacagctaaggactgcaaaacccca

SEQ ID NO: 43903 - DNA, 27 bp, Artificial Sequence
  Probe
aacagctaaggactgcaaaaccccact

SEQ ID NO: 43904 - DNA, 28 bp, Artificial Sequence
  Probe
aacagctaaggactgcaaaaccccactc

SEQ ID NO: 43905 - DNA, 29 bp, Artificial Sequence
  Probe
aacagctaaggactgcaaaaccccactct

SEQ ID NO: 43906 - DNA, 17 bp, Artificial Sequence
  Probe
aacagctatccattggt

SEQ ID NO: 43907 - DNA, 27 bp, Artificial Sequence
  Probe
aacagctatccattggtcttaggcccc

SEQ ID NO: 43908 - DNA, 29 bp, Artificial Sequence
  Probe
aacagctatccattggtcttaggccccaa

SEQ ID NO: 43909 - DNA, 50 bp, Artificial Sequence; identical to SEQ ID NO: 2044
  Probe

SEQ ID NO: 43910 - DNA, 33 bp, Artificial Sequence; identical to SEQ ID NO: 2047
  Probe

SEQ ID NO: 43911 - DNA, 34 bp, Artificial Sequence; identical to SEQ ID NO: 2048
  Probe

SEQ ID NO: 43912 - DNA, 35 bp, Artificial Sequence; identical to SEQ ID NO: 14750
  Probe

SEQ ID NO: 43913 - DNA, 36 bp, Artificial Sequence; identical to SEQ ID NO: 2049
  Probe

SEQ ID NO: 43914 - DNA, 39 bp, Artificial Sequence; identical to SEQ ID NO: 2051
  Probe

SEQ ID NO: 43915 - DNA, 23 bp, Artificial Sequence
  Probe
aacatcagattgtgaatctgaca

SEQ ID NO: 43916 - DNA, 26 bp, Artificial Sequence
  Probe
aacatcagattgtgaatctgacaaca

SEQ ID NO: 43917 - DNA, 27 bp, Artificial Sequence
  Probe
aacatcagattgtgaatctgacaacag

SEQ ID NO: 43918 - DNA, 28 bp, Artificial Sequence
  Probe
aacatcagattgtgaatctgacaacaga

SEQ ID NO: 43919 - DNA, 37 bp, Artificial Sequence; identical to SEQ ID NO: 14758
  Probe

SEQ ID NO: 43920 - DNA, 40 bp, Artificial Sequence; identical to SEQ ID NO: 24875
  Probe

SEQ ID NO: 43921 - DNA, 41 bp, Artificial Sequence; identical to SEQ ID NO: 2056
  Probe

SEQ ID NO: 43922 - DNA, 43 bp, Artificial Sequence; identical to SEQ ID NO: 40
  Probe

SEQ ID NO: 43923 - DNA, 44 bp, Artificial Sequence; identical to SEQ ID NO: 41
  Probe

SEQ ID NO: 43924 - DNA, 45 bp, Artificial Sequence; identical to SEQ ID NO: 2058
  Probe

SEQ ID NO: 43925 - DNA, 46 bp, Artificial Sequence; identical to SEQ ID NO: 2059
  Probe

SEQ ID NO: 43926 - DNA, 25 bp, Artificial Sequence
  Probe
aaccaaaacatcagattgtgaatct

SEQ ID NO: 43927 - DNA, 29 bp, Artificial Sequence
  Probe
aaccaaaacatcagattgtgaatctgaca

SEQ ID NO: 43928 - DNA, 30 bp, Artificial Sequence; identical to SEQ ID NO: 2063
  Probe

SEQ ID NO: 43929 - DNA, 31 bp, Artificial Sequence; identical to SEQ ID NO: 2064
  Probe

SEQ ID NO: 43930 - DNA, 32 bp, Artificial Sequence; identical to SEQ ID NO: 2065
  Probe

SEQ ID NO: 43931 - DNA, 33 bp, Artificial Sequence; identical to SEQ ID NO: 2066
  Probe

SEQ ID NO: 43932 - DNA, 34 bp, Artificial Sequence; identical to SEQ ID NO: 14767
  Probe

SEQ ID NO: 43933 - DNA, 35 bp, Artificial Sequence; identical to SEQ ID NO: 14768
  Probe

SEQ ID NO: 43934 - DNA, 36 bp, Artificial Sequence; identical to SEQ ID NO: 2067
  Probe

SEQ ID NO: 43935 - DNA, 37 bp, Artificial Sequence; identical to SEQ ID NO: 2068
  Probe

SEQ ID NO: 43936 - DNA, 38 bp, Artificial Sequence; identical to SEQ ID NO: 2069
  Probe

SEQ ID NO: 43937 - DNA, 43 bp, Artificial Sequence; identical to SEQ ID NO: 44
  Probe

SEQ ID NO: 43938 - DNA, 45 bp, Artificial Sequence
  Probe
aaccaaaacatcagattgtgaatctgacaacagaggcttacgacc

SEQ ID NO: 43939 - DNA, 46 bp, Artificial Sequence; identical to SEQ ID NO: 45
  Probe

SEQ ID NO: 43940 - DNA, 49 bp, Artificial Sequence; identical to SEQ ID NO: 46
  Probe

SEQ ID NO: 43941 - DNA, 21 bp, Artificial Sequence
  Probe
aaccaacacctctttacagtg

SEQ ID NO: 43942 - DNA, 22 bp, Artificial Sequence
  Probe
aaccaacacctctttacagtga

SEQ ID NO: 43943 - DNA, 24 bp, Artificial Sequence
  Probe
aaccaacacctctttacagtgaaa

SEQ ID NO: 43944 - DNA, 25 bp, Artificial Sequence
  Probe
aaccaacacctctttacagtgaaat

SEQ ID NO: 43945 - DNA, 50 bp, Artificial Sequence; identical to SEQ ID NO: 2076
  Probe

SEQ ID NO: 43946 - DNA, 36 bp, Artificial Sequence; identical to SEQ ID NO: 14782
  Probe

SEQ ID NO: 43947 - DNA, 36 bp, Artificial Sequence
  Probe
aaccaggggtcgcgagttcaaatctcgctggggcct

SEQ ID NO: 43948 - DNA, 39 bp, Artificial Sequence; identical to SEQ ID NO: 2079
  Probe

SEQ ID NO: 43949 - DNA, 39 bp, Artificial Sequence; identical to SEQ ID NO: 2080
  Probe

SEQ ID NO: 43950 - DNA, 39 bp, Artificial Sequence; identical to SEQ ID NO: 2081
  Probe

SEQ ID NO: 43951 - DNA, 28 bp, Artificial Sequence
  Probe
aaccatgcacactactataaccacccta

SEQ ID NO: 43952 - DNA, 21 bp, Artificial Sequence
  Probe
aaccatttcataactttgtca

SEQ ID NO: 43953 - DNA, 40 bp, Artificial Sequence; identical to SEQ ID NO: 2086
  Probe

SEQ ID NO: 43954 - DNA, 35 bp, Artificial Sequence; identical to SEQ ID NO: 14793
  Probe

SEQ ID NO: 43955 - DNA, 40 bp, Artificial Sequence; identical to SEQ ID NO: 2088
  Probe

SEQ ID NO: 43956 - DNA, 21 bp, Artificial Sequence
  Probe
aaccgagcgtccaagctcttt

SEQ ID NO: 43957 - DNA, 22 bp, Artificial Sequence
  Probe
aaccgagcgtccaagctctttc

SEQ ID NO: 43958 - DNA, 23 bp, Artificial Sequence
  Probe
aaccgagcgtccaagctctttcc

SEQ ID NO: 43959 - DNA, 24 bp, Artificial Sequence
  Probe
aaccgagcgtccaagctctttcca

SEQ ID NO: 43960 - DNA, 25 bp, Artificial Sequence
  Probe
aaccgagcgtccaagctctttccat

SEQ ID NO: 43961 - DNA, 26 bp, Artificial Sequence
  Probe
aaccgagcgtccaagctctttccatt

SEQ ID NO: 43962 - DNA, 27 bp, Artificial Sequence
  Probe
aaccgagcgtccaagctctttccattt

SEQ ID NO: 43963 - DNA, 28 bp, Artificial Sequence
  Probe
aaccgagcgtccaagctctttccatttt

SEQ ID NO: 43964 - DNA, 29 bp, Artificial Sequence
  Probe
aaccgagcgtccaagctctttccattttt

SEQ ID NO: 43965 - DNA, 19 bp, Artificial Sequence
  Probe
aaccggagatgaaaacctt

SEQ ID NO: 43966 - DNA, 20 bp, Artificial Sequence
  Probe
aaccggagatgaaaaccttt

SEQ ID NO: 43967 - DNA, 23 bp, Artificial Sequence
  Probe
aaccggagatgaaaacctttttc

SEQ ID NO: 43968 - DNA, 25 bp, Artificial Sequence
  Probe
aaccggagatgaaaacctttttcca

SEQ ID NO: 43969 - DNA, 28 bp, Artificial Sequence
  Probe
aaccggagatgaaaacctttttccaagg

SEQ ID NO: 43970 - DNA, 32 bp, Artificial Sequence; identical to SEQ ID NO: 2102
  Probe

SEQ ID NO: 43971 - DNA, 33 bp, Artificial Sequence; identical to SEQ ID NO: 2103
  Probe

SEQ ID NO: 43972 - DNA, 34 bp, Artificial Sequence; identical to SEQ ID NO: 2104
  Probe

SEQ ID NO: 43973 - DNA, 35 bp, Artificial Sequence; identical to SEQ ID NO: 2105
  Probe

SEQ ID NO: 43974 - DNA, 18 bp, Artificial Sequence
  Probe
aaccgggcggaaacacac

SEQ ID NO: 43975 - DNA, 19 bp, Artificial Sequence
  Probe
aaccgggcggaaacacact

SEQ ID NO: 43976 - DNA, 20 bp, Artificial Sequence
  Probe
aaccgggcggaaacacacta

SEQ ID NO: 43977 - DNA, 17 bp, Artificial Sequence
  Probe
aaccgggcggaaacacc

SEQ ID NO: 43978 - DNA, 18 bp, Artificial Sequence
  Probe
aaccgggcggaaacacct

SEQ ID NO: 43979 - DNA, 19 bp, Artificial Sequence
  Probe
aaccgggcggaaacacctc

SEQ ID NO: 43980 - DNA, 20 bp, Artificial Sequence
  Probe
aaccgggcggaaacacctcc

SEQ ID NO: 43981 - DNA, 21 bp, Artificial Sequence
  Probe
aaccgggcggaaacacctcct

SEQ ID NO: 43982 - DNA, 18 bp, Artificial Sequence
  Probe
aaccgggcggaaacacgt

SEQ ID NO: 43983 - DNA, 19 bp, Artificial Sequence
  Probe
aaccgggcggaaacacgtt

SEQ ID NO: 43984 - DNA, 20 bp, Artificial Sequence
  Probe
aaccgggcggaaacacgttt

SEQ ID NO: 43985 - DNA, 21 bp, Artificial Sequence
  Probe
aaccgggcggaaacacgtttt

SEQ ID NO: 43986 - DNA, 22 bp, Artificial Sequence
  Probe
aaccgggcggaaacacgttttt

SEQ ID NO: 43987 - DNA, 18 bp, Artificial Sequence
  Probe
aacctagccccaaaccca

SEQ ID NO: 43988 - DNA, 25 bp, Artificial Sequence
  Probe
aacctagccccaaacccactccacc

SEQ ID NO: 43989 - DNA, 26 bp, Artificial Sequence
  Probe
aacctagccccaaacccactccacct

SEQ ID NO: 43990 - DNA, 28 bp, Artificial Sequence
  Probe
aacctcagagggggcaaggcgtctgttt

SEQ ID NO: 43991 - DNA, 26 bp, Artificial Sequence
  Probe
aacctcggttcgaatccgagtcacgg

SEQ ID NO: 43992 - DNA, 31 bp, Artificial Sequence; identical to SEQ ID NO: 2118
  Probe

SEQ ID NO: 43993 - DNA, 31 bp, Artificial Sequence; identical to SEQ ID NO: 2119
  Probe

SEQ ID NO: 43994 - DNA, 30 bp, Artificial Sequence; identical to SEQ ID NO: 14840
  Probe

SEQ ID NO: 43995 - DNA, 46 bp, Artificial Sequence
  Probe
aaccttttaagttaaagattaagagaaccaacacctctttacagtg

SEQ ID NO: 43996 - DNA, 49 bp, Artificial Sequence
  Probe
aaccttttaagttaaagattaagagaaccaacacctctttacagtgaaa

SEQ ID NO: 43997 - DNA, 50 bp, Artificial Sequence; identical to SEQ ID NO: 2121
  Probe

SEQ ID NO: 43998 - DNA, 44 bp, Artificial Sequence; identical to SEQ ID NO: 14842
  Probe

SEQ ID NO: 43999 - DNA, 48 bp, Artificial Sequence; identical to SEQ ID NO: 2123
  Probe

SEQ ID NO: 44000 - DNA, 49 bp, Artificial Sequence; identical to SEQ ID NO: 2124
  Probe

SEQ ID NO: 44001 - DNA, 50 bp, Artificial Sequence; identical to SEQ ID NO: 2125
  Probe

SEQ ID NO: 44002 - DNA, 38 bp, Artificial Sequence; identical to SEQ ID NO: 26316
  Probe

SEQ ID NO: 44003 - DNA, 39 bp, Artificial Sequence; identical to SEQ ID NO: 26317
  Probe

SEQ ID NO: 44004 - DNA, 46 bp, Artificial Sequence
  Probe
aacgatggtttttcatatcattggtcgtggttgtagtccgtgcgag

SEQ ID NO: 44005 - DNA, 50 bp, Artificial Sequence; identical to SEQ ID NO: 26319
  Probe

SEQ ID NO: 44006 - DNA, 21 bp, Artificial Sequence
  Probe
aactaaatactaccgtatggc

SEQ ID NO: 44007 - DNA, 20 bp, Artificial Sequence
  Probe
aactaagtgtttgtgggttt

SEQ ID NO: 44008 - DNA, 32 bp, Artificial Sequence
  Probe
aactaagtgtttgtgggtttaagtcccattgg

SEQ ID NO: 44009 - DNA, 33 bp, Artificial Sequence; identical to SEQ ID NO: 2128
  Probe

SEQ ID NO: 44010 - DNA, 34 bp, Artificial Sequence; identical to SEQ ID NO: 2129
  Probe

SEQ ID NO: 44011 - DNA, 35 bp, Artificial Sequence; identical to SEQ ID NO: 55
  Probe

SEQ ID NO: 44012 - DNA, 36 bp, Artificial Sequence; identical to SEQ ID NO: 56
  Probe

SEQ ID NO: 44013 - DNA, 38 bp, Artificial Sequence; identical to SEQ ID NO: 14852
  Probe

SEQ ID NO: 44014 - DNA, 39 bp, Artificial Sequence; identical to SEQ ID NO: 2130
  Probe

SEQ ID NO: 44015 - DNA, 40 bp, Artificial Sequence; identical to SEQ ID NO: 2131
  Probe

SEQ ID NO: 44016 - DNA, 18 bp, Artificial Sequence
  Probe
aactcatgcccccatgtc

SEQ ID NO: 44017 - DNA, 19 bp, Artificial Sequence
  Probe
aactcatgcccccatgtct

SEQ ID NO: 44018 - DNA, 20 bp, Artificial Sequence
  Probe
aactcatgcccccatgtcta

SEQ ID NO: 44019 - DNA, 23 bp, Artificial Sequence
  Probe
aactcatgcccccatgtctaaca

SEQ ID NO: 44020 - DNA, 26 bp, Artificial Sequence
  Probe
aactcatgcccccatgtctaacaaca

SEQ ID NO: 44021 - DNA, 31 bp, Artificial Sequence; identical to SEQ ID NO: 2140
  Probe

SEQ ID NO: 44022 - DNA, 32 bp, Artificial Sequence; identical to SEQ ID NO: 2141
  Probe

SEQ ID NO: 44023 - DNA, 34 bp, Artificial Sequence; identical to SEQ ID NO: 2143
  Probe

SEQ ID NO: 44024 - DNA, 35 bp, Artificial Sequence; identical to SEQ ID NO: 2144
  Probe

SEQ ID NO: 44025 - DNA, 36 bp, Artificial Sequence; identical to SEQ ID NO: 2145
  Probe

SEQ ID NO: 44026 - DNA, 37 bp, Artificial Sequence; identical to SEQ ID NO: 2146
  Probe

SEQ ID NO: 44027 - DNA, 38 bp, Artificial Sequence; identical to SEQ ID NO: 2147
  Probe

SEQ ID NO: 44028 - DNA, 39 bp, Artificial Sequence; identical to SEQ ID NO: 2148
  Probe

SEQ ID NO: 44029 - DNA, 40 bp, Artificial Sequence; identical to SEQ ID NO: 2149
  Probe

SEQ ID NO: 44030 - DNA, 17 bp, Artificial Sequence
  Probe
aactgctaactcatgcc

SEQ ID NO: 44031 - DNA, 21 bp, Artificial Sequence
  Probe
aactgctaactcatgccccca

SEQ ID NO: 44032 - DNA, 24 bp, Artificial Sequence
  Probe
aactgctaactcatgcccccatgt

SEQ ID NO: 44033 - DNA, 25 bp, Artificial Sequence
  Probe
aactgctaactcatgcccccatgtc

SEQ ID NO: 44034 - DNA, 26 bp, Artificial Sequence
  Probe
aactgctaactcatgcccccatgtct

SEQ ID NO: 44035 - DNA, 30 bp, Artificial Sequence; identical to SEQ ID NO: 14885
  Probe

SEQ ID NO: 44036 - DNA, 33 bp, Artificial Sequence; identical to SEQ ID NO: 14887
  Probe

SEQ ID NO: 44037 - DNA, 44 bp, Artificial Sequence; identical to SEQ ID NO: 2163
  Probe

SEQ ID NO: 44038 - DNA, 46 bp, Artificial Sequence; identical to SEQ ID NO: 2165
  Probe

SEQ ID NO: 44039 - DNA, 50 bp, Artificial Sequence; identical to SEQ ID NO: 2167
  Probe

SEQ ID NO: 44040 - DNA, 27 bp, Artificial Sequence
  Probe
aacttaaaactttacagtcagaggttc

SEQ ID NO: 44041 - DNA, 29 bp, Artificial Sequence
  Probe
aacttaaaactttacagtcagaggttcaa

SEQ ID NO: 44042 - DNA, 30 bp, Artificial Sequence; identical to SEQ ID NO: 2170
  Probe

SEQ ID NO: 44043 - DNA, 37 bp, Artificial Sequence; identical to SEQ ID NO: 60
  Probe

SEQ ID NO: 44044 - DNA, 39 bp, Artificial Sequence; identical to SEQ ID NO: 62
  Probe

SEQ ID NO: 44045 - DNA, 40 bp, Artificial Sequence; identical to SEQ ID NO: 2173
  Probe

SEQ ID NO: 44046 - DNA, 41 bp, Artificial Sequence; identical to SEQ ID NO: 2174
  Probe

SEQ ID NO: 44047 - DNA, 42 bp, Artificial Sequence; identical to SEQ ID NO: 2175
  Probe

SEQ ID NO: 44048 - DNA, 43 bp, Artificial Sequence; identical to SEQ ID NO: 2176
  Probe

SEQ ID NO: 44049 - DNA, 44 bp, Artificial Sequence; identical to SEQ ID NO: 2177
  Probe

SEQ ID NO: 44050 - DNA, 45 bp, Artificial Sequence; identical to SEQ ID NO: 2178
  Probe

SEQ ID NO: 44051 - DNA, 46 bp, Artificial Sequence; identical to SEQ ID NO: 2179
  Probe

SEQ ID NO: 44052 - DNA, 50 bp, Artificial Sequence; identical to SEQ ID NO: 2180
  Probe

SEQ ID NO: 44053 - DNA, 17 bp, Artificial Sequence
  Probe
aacttaacttgaccgct

SEQ ID NO: 44054 - DNA, 22 bp, Artificial Sequence
  Probe
aacttaacttgaccgctctgag

SEQ ID NO: 44055 - DNA, 23 bp, Artificial Sequence
  Probe
aacttaacttgaccgctctgagc

SEQ ID NO: 44056 - DNA, 24 bp, Artificial Sequence
  Probe
aacttaacttgaccgctctgagct

SEQ ID NO: 44057 - DNA, 16 bp, Artificial Sequence
  Probe
aacttacacttaggag

SEQ ID NO: 44058 - DNA, 17 bp, Artificial Sequence
  Probe
aacttacacttaggaga

SEQ ID NO: 44059 - DNA, 18 bp, Artificial Sequence
  Probe
aacttacacttaggagat

SEQ ID NO: 44060 - DNA, 22 bp, Artificial Sequence
  Probe
aacttacacttaggagatttca

SEQ ID NO: 44061 - DNA, 27 bp, Artificial Sequence
  Probe
aacttacacttaggagatttcaactta

SEQ ID NO: 44062 - DNA, 30 bp, Artificial Sequence; identical to SEQ ID NO: 14931
  Probe

SEQ ID NO: 44063 - DNA, 32 bp, Artificial Sequence
  Probe
aacttacacttaggagatttcaacttaacttg

SEQ ID NO: 44064 - DNA, 34 bp, Artificial Sequence; identical to SEQ ID NO: 14933
  Probe

SEQ ID NO: 44065 - DNA, 35 bp, Artificial Sequence; identical to SEQ ID NO: 14934
  Probe

SEQ ID NO: 44066 - DNA, 36 bp, Artificial Sequence; identical to SEQ ID NO: 2188
  Probe

SEQ ID NO: 44067 - DNA, 37 bp, Artificial Sequence; identical to SEQ ID NO: 2189
  Probe

SEQ ID NO: 44068 - DNA, 38 bp, Artificial Sequence; identical to SEQ ID NO: 2190
  Probe

SEQ ID NO: 44069 - DNA, 39 bp, Artificial Sequence; identical to SEQ ID NO: 2191
  Probe

SEQ ID NO: 44070 - DNA, 40 bp, Artificial Sequence; identical to SEQ ID NO: 14939
  Probe

SEQ ID NO: 44071 - DNA, 42 bp, Artificial Sequence; identical to SEQ ID NO: 2192
  Probe

SEQ ID NO: 44072 - DNA, 43 bp, Artificial Sequence; identical to SEQ ID NO: 2193
  Probe

SEQ ID NO: 44073 - DNA, 44 bp, Artificial Sequence; identical to SEQ ID NO: 2194
  Probe

SEQ ID NO: 44074 - DNA, 45 bp, Artificial Sequence; identical to SEQ ID NO: 2195
  Probe

SEQ ID NO: 44075 - DNA, 50 bp, Artificial Sequence; identical to SEQ ID NO: 2197
  Probe

SEQ ID NO: 44076 - DNA, 18 bp, Artificial Sequence
  Probe
aacttagcattaaccttt

SEQ ID NO: 44077 - DNA, 39 bp, Artificial Sequence
  Probe
aacttagcattaaccttttaagttaaagattaagagaac

SEQ ID NO: 44078 - DNA, 41 bp, Artificial Sequence; identical to SEQ ID NO: 12487
  Probe

SEQ ID NO: 44079 - DNA, 44 bp, Artificial Sequence; identical to SEQ ID NO: 2200
  Probe

SEQ ID NO: 44080 - DNA, 50 bp, Artificial Sequence; identical to SEQ ID NO: 2201
  Probe

SEQ ID NO: 44081 - DNA, 25 bp, Artificial Sequence
  Probe
aacttccaattaactagttttgaca

SEQ ID NO: 44082 - DNA, 39 bp, Artificial Sequence
  Probe
aacttccaattaactagttttgacaacattcaaaaaaga

SEQ ID NO: 44083 - DNA, 44 bp, Artificial Sequence; identical to SEQ ID NO: 2202
  Probe

SEQ ID NO: 44084 - DNA, 45 bp, Artificial Sequence; identical to SEQ ID NO: 2203
  Probe

SEQ ID NO: 44085 - DNA, 18 bp, Artificial Sequence
  Probe
aacttgaccgctctgagc

SEQ ID NO: 44086 - DNA, 20 bp, Artificial Sequence
  Probe
aactttacagtcagaggttc

SEQ ID NO: 44087 - DNA, 21 bp, Artificial Sequence
  Probe
aactttacagtcagaggttca

SEQ ID NO: 44088 - DNA, 31 bp, Artificial Sequence; identical to SEQ ID NO: 65
  Probe

SEQ ID NO: 44089 - DNA, 32 bp, Artificial Sequence; identical to SEQ ID NO: 2206
  Probe

SEQ ID NO: 44090 - DNA, 33 bp, Artificial Sequence; identical to SEQ ID NO: 2207
  Probe

SEQ ID NO: 44091 - DNA, 34 bp, Artificial Sequence; identical to SEQ ID NO: 2208
  Probe

SEQ ID NO: 44092 - DNA, 36 bp, Artificial Sequence; identical to SEQ ID NO: 2210
  Probe

SEQ ID NO: 44093 - DNA, 38 bp, Artificial Sequence; identical to SEQ ID NO: 2212
  Probe

SEQ ID NO: 44094 - DNA, 39 bp, Artificial Sequence; identical to SEQ ID NO: 2213
  Probe

SEQ ID NO: 44095 - DNA, 40 bp, Artificial Sequence; identical to SEQ ID NO: 2214
  Probe

SEQ ID NO: 44096 - DNA, 18 bp, Artificial Sequence
  Probe
aagaactgctaactcatg

SEQ ID NO: 44097 - DNA, 45 bp, Artificial Sequence; identical to SEQ ID NO: 69
  Probe

SEQ ID NO: 44098 - DNA, 49 bp, Artificial Sequence; identical to SEQ ID NO: 2229
  Probe

SEQ ID NO: 44099 - DNA, 50 bp, Artificial Sequence; identical to SEQ ID NO: 2230
  Probe

SEQ ID NO: 44100 - DNA, 25 bp, Artificial Sequence
  Probe
aagaagcagcttcaaacctgccggg

SEQ ID NO: 44101 - DNA, 26 bp, Artificial Sequence
  Probe
aagaagcagcttcaaacctgccgggg

SEQ ID NO: 44102 - DNA, 27 bp, Artificial Sequence
  Probe
aagaagcagcttcaaacctgccggggc

SEQ ID NO: 44103 - DNA, 29 bp, Artificial Sequence
  Probe
aagaagcagcttcaaacctgccggggctt

SEQ ID NO: 44104 - DNA, 30 bp, Artificial Sequence; identical to SEQ ID NO: 14981
  Probe

SEQ ID NO: 44105 - DNA, 31 bp, Artificial Sequence; identical to SEQ ID NO: 2232
  Probe

SEQ ID NO: 44106 - DNA, 32 bp, Artificial Sequence; identical to SEQ ID NO: 2233
  Probe

SEQ ID NO: 44107 - DNA, 31 bp, Artificial Sequence; identical to SEQ ID NO: 2247
  Probe

SEQ ID NO: 44108 - DNA, 26 bp, Artificial Sequence
  Probe
aagagaaccaacacctctttacagtg

SEQ ID NO: 44109 - DNA, 27 bp, Artificial Sequence
  Probe
aagagaaccaacacctctttacagtga

SEQ ID NO: 44110 - DNA, 30 bp, Artificial Sequence; identical to SEQ ID NO: 2251
  Probe

SEQ ID NO: 44111 - DNA, 37 bp, Artificial Sequence; identical to SEQ ID NO: 15012
  Probe

SEQ ID NO: 44112 - DNA, 24 bp, Artificial Sequence
  Probe
aagattaagagaaccaacacctct

SEQ ID NO: 44113 - DNA, 31 bp, Artificial Sequence; identical to SEQ ID NO: 15021
  Probe

SEQ ID NO: 44114 - DNA, 32 bp, Artificial Sequence; identical to SEQ ID NO: 2257
  Probe

SEQ ID NO: 44115 - DNA, 33 bp, Artificial Sequence; identical to SEQ ID NO: 2258
  Probe

SEQ ID NO: 44116 - DNA, 34 bp, Artificial Sequence; identical to SEQ ID NO: 2259
  Probe

SEQ ID NO: 44117 - DNA, 35 bp, Artificial Sequence; identical to SEQ ID NO: 15025
  Probe

SEQ ID NO: 44118 - DNA, 36 bp, Artificial Sequence; identical to SEQ ID NO: 2260
  Probe

SEQ ID NO: 44119 - DNA, 29 bp, Artificial Sequence
  Probe
aagattctaggttcgactcctggctggct

SEQ ID NO: 44120 - DNA, 29 bp, Artificial Sequence
  Probe
aagattgagggttcgagtcccttcgtggt

SEQ ID NO: 44121 - DNA, 29 bp, Artificial Sequence
  Probe
aagattgcaggttcgagtcctgccgcggt

SEQ ID NO: 44122 - DNA, 27 bp, Artificial Sequence
  Probe
aagcaatacactgaaaatgtttagacg

SEQ ID NO: 44123 - DNA, 35 bp, Artificial Sequence; identical to SEQ ID NO: 77
  Probe

SEQ ID NO: 44124 - DNA, 44 bp, Artificial Sequence; identical to SEQ ID NO: 2268
  Probe

SEQ ID NO: 44125 - DNA, 50 bp, Artificial Sequence; identical to SEQ ID NO: 2271
  Probe

SEQ ID NO: 44126 - DNA, 16 bp, Artificial Sequence
  Probe
aagcacccaacttaca

SEQ ID NO: 44127 - DNA, 18 bp, Artificial Sequence
  Probe
aagcacccaacttacact

SEQ ID NO: 44128 - DNA, 19 bp, Artificial Sequence
  Probe
aagcacccaacttacactt

SEQ ID NO: 44129 - DNA, 20 bp, Artificial Sequence
  Probe
aagcacccaacttacactta

SEQ ID NO: 44130 - DNA, 21 bp, Artificial Sequence
  Probe
aagcacccaacttacacttag

SEQ ID NO: 44131 - DNA, 23 bp, Artificial Sequence
  Probe
aagcacccaacttacacttagga

SEQ ID NO: 44132 - DNA, 24 bp, Artificial Sequence
  Probe
aagcacccaacttacacttaggag

SEQ ID NO: 44133 - DNA, 25 bp, Artificial Sequence
  Probe
aagcacccaacttacacttaggaga

SEQ ID NO: 44134 - DNA, 26 bp, Artificial Sequence
  Probe
aagcacccaacttacacttaggagat

SEQ ID NO: 44135 - DNA, 27 bp, Artificial Sequence
  Probe
aagcacccaacttacacttaggagatt

SEQ ID NO: 44136 - DNA, 28 bp, Artificial Sequence
  Probe
aagcacccaacttacacttaggagattt

SEQ ID NO: 44137 - DNA, 29 bp, Artificial Sequence
  Probe
aagcacccaacttacacttaggagatttc

SEQ ID NO: 44138 - DNA, 30 bp, Artificial Sequence; identical to SEQ ID NO: 2277
  Probe

SEQ ID NO: 44139 - DNA, 31 bp, Artificial Sequence; identical to SEQ ID NO: 15051
  Probe

SEQ ID NO: 44140 - DNA, 32 bp, Artificial Sequence; identical to SEQ ID NO: 2278
  Probe

SEQ ID NO: 44141 - DNA, 33 bp, Artificial Sequence; identical to SEQ ID NO: 2279
  Probe

SEQ ID NO: 44142 - DNA, 34 bp, Artificial Sequence
  Probe
aagcacccaacttacacttaggagatttcaactt

SEQ ID NO: 44143 - DNA, 35 bp, Artificial Sequence; identical to SEQ ID NO: 15054
  Probe

SEQ ID NO: 44144 - DNA, 36 bp, Artificial Sequence; identical to SEQ ID NO: 15055
  Probe

SEQ ID NO: 44145 - DNA, 38 bp, Artificial Sequence; identical to SEQ ID NO: 15056
  Probe

SEQ ID NO: 44146 - DNA, 39 bp, Artificial Sequence; identical to SEQ ID NO: 15057
  Probe

SEQ ID NO: 44147 - DNA, 40 bp, Artificial Sequence
  Probe
aagcacccaacttacacttaggagatttcaacttaacttg

SEQ ID NO: 44148 - DNA, 42 bp, Artificial Sequence; identical to SEQ ID NO: 15058
  Probe

SEQ ID NO: 44149 - DNA, 43 bp, Artificial Sequence
  Probe
aagcacccaacttacacttaggagatttcaacttaacttgacc

SEQ ID NO: 44150 - DNA, 44 bp, Artificial Sequence; identical to SEQ ID NO: 2280
  Probe

SEQ ID NO: 44151 - DNA, 45 bp, Artificial Sequence
  Probe
aagcacccaacttacacttaggagatttcaacttaacttgaccgc

SEQ ID NO: 44152 - DNA, 46 bp, Artificial Sequence; identical to SEQ ID NO: 15060
  Probe

SEQ ID NO: 44153 - DNA, 49 bp, Artificial Sequence; identical to SEQ ID NO: 2282
  Probe

SEQ ID NO: 44154 - DNA, 50 bp, Artificial Sequence; identical to SEQ ID NO: 2283
  Probe

SEQ ID NO: 44155 - DNA, 29 bp, Artificial Sequence
  Probe
aagcagcttcaaacctgccggggcttctc

SEQ ID NO: 44156 - DNA, 39 bp, Artificial Sequence; identical to SEQ ID NO: 2288
  Probe

SEQ ID NO: 44157 - DNA, 39 bp, Artificial Sequence; identical to SEQ ID NO: 2289
  Probe

SEQ ID NO: 44158 - DNA, 50 bp, Artificial Sequence; identical to SEQ ID NO: 2291
  Probe

SEQ ID NO: 44159 - DNA, 40 bp, Artificial Sequence; identical to SEQ ID NO: 2292
  Probe

SEQ ID NO: 44160 - DNA, 40 bp, Artificial Sequence; identical to SEQ ID NO: 2293
  Probe

SEQ ID NO: 44161 - DNA, 35 bp, Artificial Sequence; identical to SEQ ID NO: 15080
  Probe

SEQ ID NO: 44162 - DNA, 36 bp, Artificial Sequence; identical to SEQ ID NO: 26551
  Probe

SEQ ID NO: 44163 - DNA, 37 bp, Artificial Sequence; identical to SEQ ID NO: 15081
  Probe

SEQ ID NO: 44164 - DNA, 40 bp, Artificial Sequence; identical to SEQ ID NO: 2295
  Probe

SEQ ID NO: 44165 - DNA, 22 bp, Artificial Sequence
  Probe
aagctatcgggcccataccccg

SEQ ID NO: 44166 - DNA, 23 bp, Artificial Sequence
  Probe
aagctatcgggcccataccccga

SEQ ID NO: 44167 - DNA, 24 bp, Artificial Sequence
  Probe
aagctatcgggcccataccccgaa

SEQ ID NO: 44168 - DNA, 25 bp, Artificial Sequence
  Probe
aagctatcgggcccataccccgaaa

SEQ ID NO: 44169 - DNA, 26 bp, Artificial Sequence
  Probe
aagctatcgggcccataccccgaaaa

SEQ ID NO: 44170 - DNA, 27 bp, Artificial Sequence
  Probe
aagctatcgggcccataccccgaaaat

SEQ ID NO: 44171 - DNA, 28 bp, Artificial Sequence
  Probe
aagctatcgggcccataccccgaaaatg

SEQ ID NO: 44172 - DNA, 29 bp, Artificial Sequence
  Probe
aagctatcgggcccataccccgaaaatgt

SEQ ID NO: 44173 - DNA, 30 bp, Artificial Sequence; identical to SEQ ID NO: 2306
  Probe

SEQ ID NO: 44174 - DNA, 31 bp, Artificial Sequence; identical to SEQ ID NO: 2307
  Probe

SEQ ID NO: 44175 - DNA, 32 bp, Artificial Sequence; identical to SEQ ID NO: 2308
  Probe

SEQ ID NO: 44176 - DNA, 34 bp, Artificial Sequence; identical to SEQ ID NO: 2310
  Probe

SEQ ID NO: 44177 - DNA, 35 bp, Artificial Sequence; identical to SEQ ID NO: 2311
  Probe

SEQ ID NO: 44178 - DNA, 49 bp, Artificial Sequence; identical to SEQ ID NO: 2314
  Probe

SEQ ID NO: 44179 - DNA, 18 bp, Artificial Sequence
  Probe
aagctcacaagaactgct

SEQ ID NO: 44180 - DNA, 23 bp, Artificial Sequence
  Probe
aagctcacaagaactgctaactc

SEQ ID NO: 44181 - DNA, 24 bp, Artificial Sequence
  Probe
aagctcacaagaactgctaactca

SEQ ID NO: 44182 - DNA, 26 bp, Artificial Sequence
  Probe
aagctcacaagaactgctaactcatg

SEQ ID NO: 44183 - DNA, 37 bp, Artificial Sequence
  Probe
aagctcacaagaactgctaactcatgcccccatgtct

SEQ ID NO: 44184 - DNA, 50 bp, Artificial Sequence; identical to SEQ ID NO: 84
  Probe

SEQ ID NO: 44185 - DNA, 50 bp, Artificial Sequence
  Probe
aaggcatcagcctccggagctggggattgtgggttcgagtcccatctggg

SEQ ID NO: 44186 - DNA, 26 bp, Artificial Sequence
  Probe
aagggcttagcttaattaaagtggct

SEQ ID NO: 44187 - DNA, 29 bp, Artificial Sequence
  Probe
aagggcttagcttaattaaagtggctgat

SEQ ID NO: 44188 - DNA, 36 bp, Artificial Sequence; identical to SEQ ID NO: 15125
  Probe

SEQ ID NO: 44189 - DNA, 50 bp, Artificial Sequence; identical to SEQ ID NO: 37653
  Probe

SEQ ID NO: 44190 - DNA, 26 bp, Artificial Sequence
  Probe
aaggtcagctaaataagctatcgggc

SEQ ID NO: 44191 - DNA, 27 bp, Artificial Sequence
  Probe
aaggtcagctaaataagctatcgggcc

SEQ ID NO: 44192 - DNA, 29 bp, Artificial Sequence
  Probe
aaggtcagctaaataagctatcgggccca

SEQ ID NO: 44193 - DNA, 31 bp, Artificial Sequence; identical to SEQ ID NO: 2343
  Probe

SEQ ID NO: 44194 - DNA, 32 bp, Artificial Sequence; identical to SEQ ID NO: 2344
  Probe

SEQ ID NO: 44195 - DNA, 35 bp, Artificial Sequence; identical to SEQ ID NO: 15140
  Probe

SEQ ID NO: 44196 - DNA, 43 bp, Artificial Sequence; identical to SEQ ID NO: 2352
  Probe

SEQ ID NO: 44197 - DNA, 44 bp, Artificial Sequence; identical to SEQ ID NO: 2353
  Probe

SEQ ID NO: 44198 - DNA, 45 bp, Artificial Sequence; identical to SEQ ID NO: 2354
  Probe

SEQ ID NO: 44199 - DNA, 50 bp, Artificial Sequence; identical to SEQ ID NO: 2358
  Probe

SEQ ID NO: 44200 - DNA, 31 bp, Artificial Sequence; identical to SEQ ID NO: 36120
  Probe

SEQ ID NO: 44201 - DNA, 32 bp, Artificial Sequence
  Probe
aaggtcctgagttcgaacctcagagggggcaa

SEQ ID NO: 44202 - DNA, 32 bp, Artificial Sequence
  Probe
aaggtcctgagttcgaacctcagagggggcag

SEQ ID NO: 44203 - DNA, 32 bp, Artificial Sequence; identical to SEQ ID NO: 2359
  Probe

SEQ ID NO: 44204 - DNA, 33 bp, Artificial Sequence; identical to SEQ ID NO: 15150
  Probe

SEQ ID NO: 44205 - DNA, 34 bp, Artificial Sequence; identical to SEQ ID NO: 2360
  Probe

SEQ ID NO: 44206 - DNA, 34 bp, Artificial Sequence; identical to SEQ ID NO: 2361
  Probe

SEQ ID NO: 44207 - DNA, 34 bp, Artificial Sequence; identical to SEQ ID NO: 2362
  Probe

SEQ ID NO: 44208 - DNA, 31 bp, Artificial Sequence
  Probe
aaggtcgtgagttcgatcctcacacggggca

SEQ ID NO: 44209 - DNA, 34 bp, Artificial Sequence; identical to SEQ ID NO: 15156
  Probe

SEQ ID NO: 44210 - DNA, 29 bp, Artificial Sequence
  Probe
aaggttccgggttcgagtcccggcggagt

SEQ ID NO: 44211 - DNA, 31 bp, Artificial Sequence; identical to SEQ ID NO: 37674
  Probe

SEQ ID NO: 44212 - DNA, 27 bp, Artificial Sequence
  Probe
aaggttgcgtgttcaagtcacgtcggg

SEQ ID NO: 44213 - DNA, 29 bp, Artificial Sequence
  Probe
aaggttggtggttcgatcccacccaggga

SEQ ID NO: 44214 - DNA, 23 bp, Artificial Sequence
  Probe
aagtcatggaggccatggggttg

SEQ ID NO: 44215 - DNA, 20 bp, Artificial Sequence
  Probe
aagtccctgttcgggcggca

SEQ ID NO: 44216 - DNA, 17 bp, Artificial Sequence
  Probe
aagtgtactggaaagtg

SEQ ID NO: 44217 - DNA, 21 bp, Artificial Sequence
  Probe
aagtgtactggaaagtgcact

SEQ ID NO: 44218 - DNA, 24 bp, Artificial Sequence
  Probe
aagtgtactggaaagtgcacttgg

SEQ ID NO: 44219 - DNA, 25 bp, Artificial Sequence
  Probe
aagtgtactggaaagtgcacttgga

SEQ ID NO: 44220 - DNA, 26 bp, Artificial Sequence
  Probe
aagtgtactggaaagtgcacttggac

SEQ ID NO: 44221 - DNA, 27 bp, Artificial Sequence
  Probe
aagtgtactggaaagtgcacttggacg

SEQ ID NO: 44222 - DNA, 28 bp, Artificial Sequence
  Probe
aagtgtactggaaagtgcacttggacga

SEQ ID NO: 44223 - DNA, 29 bp, Artificial Sequence
  Probe
aagtgtactggaaagtgcacttggacgaa

SEQ ID NO: 44224 - DNA, 30 bp, Artificial Sequence; identical to SEQ ID NO: 2379
  Probe

SEQ ID NO: 44225 - DNA, 31 bp, Artificial Sequence; identical to SEQ ID NO: 2380
  Probe

SEQ ID NO: 44226 - DNA, 32 bp, Artificial Sequence; identical to SEQ ID NO: 2381
  Probe

SEQ ID NO: 44227 - DNA, 33 bp, Artificial Sequence; identical to SEQ ID NO: 2382
  Probe

SEQ ID NO: 44228 - DNA, 34 bp, Artificial Sequence; identical to SEQ ID NO: 2383
  Probe

SEQ ID NO: 44229 - DNA, 35 bp, Artificial Sequence; identical to SEQ ID NO: 2384
  Probe

SEQ ID NO: 44230 - DNA, 36 bp, Artificial Sequence; identical to SEQ ID NO: 2385
  Probe

SEQ ID NO: 44231 - DNA, 37 bp, Artificial Sequence; identical to SEQ ID NO: 2386
  Probe

SEQ ID NO: 44232 - DNA, 39 bp, Artificial Sequence; identical to SEQ ID NO: 2387
  Probe

SEQ ID NO: 44233 - DNA, 27 bp, Artificial Sequence
  Probe
aagtgtttgtgggtttaagtcccattg

SEQ ID NO: 44234 - DNA, 28 bp, Artificial Sequence
  Probe
aagtgtttgtgggtttaagtcccattgg

SEQ ID NO: 44235 - DNA, 33 bp, Artificial Sequence; identical to SEQ ID NO: 2392
  Probe

SEQ ID NO: 44236 - DNA, 34 bp, Artificial Sequence; identical to SEQ ID NO: 2393
  Probe

SEQ ID NO: 44237 - DNA, 35 bp, Artificial Sequence; identical to SEQ ID NO: 2394
  Probe

SEQ ID NO: 44238 - DNA, 36 bp, Artificial Sequence; identical to SEQ ID NO: 15184
  Probe

SEQ ID NO: 44239 - DNA, 38 bp, Artificial Sequence; identical to SEQ ID NO: 2395
  Probe

SEQ ID NO: 44240 - DNA, 39 bp, Artificial Sequence; identical to SEQ ID NO: 2396
  Probe

SEQ ID NO: 44241 - DNA, 41 bp, Artificial Sequence; identical to SEQ ID NO: 2398
  Probe

SEQ ID NO: 44242 - DNA, 42 bp, Artificial Sequence; identical to SEQ ID NO: 2399
  Probe

SEQ ID NO: 44243 - DNA, 29 bp, Artificial Sequence
  Probe
aagttaaattataggctaaatcctatata

SEQ ID NO: 44244 - DNA, 31 bp, Artificial Sequence
  Probe
aagttaaattataggctaaatcctatatatc

SEQ ID NO: 44245 - DNA, 50 bp, Artificial Sequence; identical to SEQ ID NO: 2411
  Probe

SEQ ID NO: 44246 - DNA, 49 bp, Artificial Sequence; identical to SEQ ID NO: 2416
  Probe

SEQ ID NO: 44247 - DNA, 50 bp, Artificial Sequence; identical to SEQ ID NO: 2417
  Probe

SEQ ID NO: 44248 - DNA, 17 bp, Artificial Sequence
  Probe
aataggagcttaaaccc

SEQ ID NO: 44249 - DNA, 19 bp, Artificial Sequence
  Probe
aataggagcttaaaccccc

SEQ ID NO: 44250 - DNA, 30 bp, Artificial Sequence; identical to SEQ ID NO: 2424
  Probe

SEQ ID NO: 44251 - DNA, 19 bp, Artificial Sequence
  Probe
aatagtaccgttaacttcc

SEQ ID NO: 44252 - DNA, 37 bp, Artificial Sequence; identical to SEQ ID NO: 15211
  Probe

SEQ ID NO: 44253 - DNA, 40 bp, Artificial Sequence
  Probe
aatagtaccgttaacttccaattaactagttttgacaaca

SEQ ID NO: 44254 - DNA, 50 bp, Artificial Sequence; identical to SEQ ID NO: 2425
  Probe

SEQ ID NO: 44255 - DNA, 25 bp, Artificial Sequence
  Probe
aatcagagaaaaagtctttaactcc

SEQ ID NO: 44256 - DNA, 30 bp, Artificial Sequence; identical to SEQ ID NO: 15218
  Probe

SEQ ID NO: 44257 - DNA, 19 bp, Artificial Sequence
  Probe
aatccagcgatccgagttc

SEQ ID NO: 44258 - DNA, 21 bp, Artificial Sequence
  Probe
aatccagcgatccgagttcaa

SEQ ID NO: 44259 - DNA, 23 bp, Artificial Sequence
  Probe
aatccagcgatccgagttcaaat

SEQ ID NO: 44260 - DNA, 36 bp, Artificial Sequence; identical to SEQ ID NO: 93
  Probe

SEQ ID NO: 44261 - DNA, 37 bp, Artificial Sequence; identical to SEQ ID NO: 2430
  Probe

SEQ ID NO: 44262 - DNA, 38 bp, Artificial Sequence; identical to SEQ ID NO: 2431
  Probe

SEQ ID NO: 44263 - DNA, 39 bp, Artificial Sequence; identical to SEQ ID NO: 2432
  Probe

SEQ ID NO: 44264 - DNA, 38 bp, Artificial Sequence; identical to SEQ ID NO: 2435
  Probe

SEQ ID NO: 44265 - DNA, 37 bp, Artificial Sequence; identical to SEQ ID NO: 2436
  Probe

SEQ ID NO: 44266 - DNA, 38 bp, Artificial Sequence; identical to SEQ ID NO: 2437
  Probe

SEQ ID NO: 44267 - DNA, 35 bp, Artificial Sequence; identical to SEQ ID NO: 94
  Probe

SEQ ID NO: 44268 - DNA, 36 bp, Artificial Sequence; identical to SEQ ID NO: 95
  Probe

SEQ ID NO: 44269 - DNA, 37 bp, Artificial Sequence; identical to SEQ ID NO: 96
  Probe

SEQ ID NO: 44270 - DNA, 38 bp, Artificial Sequence; identical to SEQ ID NO: 2441
  Probe

SEQ ID NO: 44271 - DNA, 39 bp, Artificial Sequence; identical to SEQ ID NO: 2442
  Probe

SEQ ID NO: 44272 - DNA, 25 bp, Artificial Sequence
  Probe
aatccattggggtttccccgcgcag

SEQ ID NO: 44273 - DNA, 43 bp, Artificial Sequence
  Probe
aatccattggggtttccccgcgcaggttcgaatcctgccgact

SEQ ID NO: 44274 - DNA, 18 bp, Artificial Sequence
  Probe
aatcccaccgctgccaca

SEQ ID NO: 44275 - DNA, 19 bp, Artificial Sequence
  Probe
aatcccaccgctgccacac

SEQ ID NO: 44276 - DNA, 19 bp, Artificial Sequence
  Probe
aatcccaccgctgccaggt

SEQ ID NO: 44277 - DNA, 21 bp, Artificial Sequence
  Probe
aatcccaccgctgccaggttt

SEQ ID NO: 44278 - DNA, 16 bp, Artificial Sequence
  Probe
aatcccactcctgaca

SEQ ID NO: 44279 - DNA, 16 bp, Artificial Sequence
  Probe
aatcccacttctgaca

SEQ ID NO: 44280 - DNA, 19 bp, Artificial Sequence
  Probe
aatcccagcggtgcctccg

SEQ ID NO: 44281 - DNA, 17 bp, Artificial Sequence
  Probe
aatcccggacgagcccc

SEQ ID NO: 44282 - DNA, 16 bp, Artificial Sequence
  Probe
aatccgagtcacggca

SEQ ID NO: 44283 - DNA, 18 bp, Artificial Sequence
  Probe
aatccgggtgccccctca

SEQ ID NO: 44284 - DNA, 19 bp, Artificial Sequence
  Probe
aatccgggtgccccctcaa

SEQ ID NO: 44285 - DNA, 19 bp, Artificial Sequence
  Probe
aatcctatatatcttaatg

SEQ ID NO: 44286 - DNA, 19 bp, Artificial Sequence
  Probe
aatcctgccgactacggca

SEQ ID NO: 44287 - DNA, 19 bp, Artificial Sequence
  Probe
aatcctgccgactacgtca

SEQ ID NO: 44288 - DNA, 29 bp, Artificial Sequence
  Probe
aatcgcataaaacttaaaactttacagtc

SEQ ID NO: 44289 - DNA, 32 bp, Artificial Sequence; identical to SEQ ID NO: 15259
  Probe

SEQ ID NO: 44290 - DNA, 37 bp, Artificial Sequence; identical to SEQ ID NO: 2460
  Probe

SEQ ID NO: 44291 - DNA, 38 bp, Artificial Sequence; identical to SEQ ID NO: 15261
  Probe

SEQ ID NO: 44292 - DNA, 50 bp, Artificial Sequence; identical to SEQ ID NO: 101
  Probe

SEQ ID NO: 44293 - DNA, 29 bp, Artificial Sequence
  Probe
aatctaaagacaggggttaggcctctttt

SEQ ID NO: 44294 - DNA, 33 bp, Artificial Sequence; identical to SEQ ID NO: 102
  Probe

SEQ ID NO: 44295 - DNA, 34 bp, Artificial Sequence; identical to SEQ ID NO: 103
  Probe

SEQ ID NO: 44296 - DNA, 36 bp, Artificial Sequence; identical to SEQ ID NO: 2466
  Probe

SEQ ID NO: 44297 - DNA, 37 bp, Artificial Sequence; identical to SEQ ID NO: 2467
  Probe

SEQ ID NO: 44298 - DNA, 38 bp, Artificial Sequence; identical to SEQ ID NO: 2468
  Probe

SEQ ID NO: 44299 - DNA, 26 bp, Artificial Sequence
  Probe
aatctgacaacagaggcttacgaccc

SEQ ID NO: 44300 - DNA, 29 bp, Artificial Sequence
  Probe
aatctgacaacagaggcttacgacccctt

SEQ ID NO: 44301 - DNA, 32 bp, Artificial Sequence; identical to SEQ ID NO: 108
  Probe

SEQ ID NO: 44302 - DNA, 36 bp, Artificial Sequence; identical to SEQ ID NO: 111
  Probe

SEQ ID NO: 44303 - DNA, 37 bp, Artificial Sequence; identical to SEQ ID NO: 2478
  Probe

SEQ ID NO: 44304 - DNA, 38 bp, Artificial Sequence; identical to SEQ ID NO: 2479
  Probe

SEQ ID NO: 44305 - DNA, 39 bp, Artificial Sequence; identical to SEQ ID NO: 2480
  Probe

SEQ ID NO: 44306 - DNA, 50 bp, Artificial Sequence; identical to SEQ ID NO: 2483
  Probe

SEQ ID NO: 44307 - DNA, 45 bp, Artificial Sequence; identical to SEQ ID NO: 2484
  Probe

SEQ ID NO: 44308 - DNA, 17 bp, Artificial Sequence
  Probe
aatgccccaactaaata

SEQ ID NO: 44309 - DNA, 19 bp, Artificial Sequence
  Probe
aatgccccaactaaatact

SEQ ID NO: 44310 - DNA, 20 bp, Artificial Sequence
  Probe
aatgccccaactaaatacta

SEQ ID NO: 44311 - DNA, 21 bp, Artificial Sequence
  Probe
aatgccccaactaaatactac

SEQ ID NO: 44312 - DNA, 22 bp, Artificial Sequence
  Probe
aatgccccaactaaatactacc

SEQ ID NO: 44313 - DNA, 23 bp, Artificial Sequence
  Probe
aatgccccaactaaatactaccg

SEQ ID NO: 44314 - DNA, 24 bp, Artificial Sequence
  Probe
aatgccccaactaaatactaccgt

SEQ ID NO: 44315 - DNA, 25 bp, Artificial Sequence
  Probe
aatgccccaactaaatactaccgta

SEQ ID NO: 44316 - DNA, 26 bp, Artificial Sequence
  Probe
aatgccccaactaaatactaccgtat

SEQ ID NO: 44317 - DNA, 27 bp, Artificial Sequence
  Probe
aatgccccaactaaatactaccgtatg

SEQ ID NO: 44318 - DNA, 28 bp, Artificial Sequence
  Probe
aatgccccaactaaatactaccgtatgg

SEQ ID NO: 44319 - DNA, 29 bp, Artificial Sequence
  Probe
aatgccccaactaaatactaccgtatggc

SEQ ID NO: 44320 - DNA, 29 bp, Artificial Sequence
  Probe
aatggtggagttaaagactttttctctga

SEQ ID NO: 44321 - DNA, 31 bp, Artificial Sequence; identical to SEQ ID NO: 2497
  Probe

SEQ ID NO: 44322 - DNA, 32 bp, Artificial Sequence; identical to SEQ ID NO: 2498
  Probe

SEQ ID NO: 44323 - DNA, 34 bp, Artificial Sequence; identical to SEQ ID NO: 2499
  Probe

SEQ ID NO: 44324 - DNA, 26 bp, Artificial Sequence
  Probe
aatgttggttatacccttcccgtact

SEQ ID NO: 44325 - DNA, 27 bp, Artificial Sequence
  Probe
aatgttggttatacccttcccgtacta

SEQ ID NO: 44326 - DNA, 18 bp, Artificial Sequence
  Probe
aattaactagttttgaca

SEQ ID NO: 44327 - DNA, 32 bp, Artificial Sequence
  Probe
aattaactagttttgacaacattcaaaaaaga

SEQ ID NO: 44328 - DNA, 33 bp, Artificial Sequence; identical to SEQ ID NO: 15305
  Probe

SEQ ID NO: 44329 - DNA, 38 bp, Artificial Sequence; identical to SEQ ID NO: 2503
  Probe

SEQ ID NO: 44330 - DNA, 38 bp, Artificial Sequence; identical to SEQ ID NO: 15309
  Probe

SEQ ID NO: 44331 - DNA, 50 bp, Artificial Sequence; identical to SEQ ID NO: 113
  Probe

SEQ ID NO: 44332 - DNA, 20 bp, Artificial Sequence
  Probe
aattcccggtcagggaacca

SEQ ID NO: 44333 - DNA, 32 bp, Artificial Sequence
  Probe
aattcgaagaagcagcttcaaacctgccgggg

SEQ ID NO: 44334 - DNA, 36 bp, Artificial Sequence; identical to SEQ ID NO: 26921
  Probe

SEQ ID NO: 44335 - DNA, 37 bp, Artificial Sequence; identical to SEQ ID NO: 2507
  Probe

SEQ ID NO: 44336 - DNA, 38 bp, Artificial Sequence; identical to SEQ ID NO: 2508
  Probe

SEQ ID NO: 44337 - DNA, 21 bp, Artificial Sequence
  Probe
aattgcaaattcgaagaagca

SEQ ID NO: 44338 - DNA, 31 bp, Artificial Sequence; identical to SEQ ID NO: 2510
  Probe

SEQ ID NO: 44339 - DNA, 32 bp, Artificial Sequence; identical to SEQ ID NO: 2511
  Probe

SEQ ID NO: 44340 - DNA, 35 bp, Artificial Sequence
  Probe
aattgcaaattcgaagaagcagcttcaaacctgcc

SEQ ID NO: 44341 - DNA, 38 bp, Artificial Sequence; identical to SEQ ID NO: 2514
  Probe

SEQ ID NO: 44342 - DNA, 39 bp, Artificial Sequence; identical to SEQ ID NO: 2515
  Probe

SEQ ID NO: 44343 - DNA, 40 bp, Artificial Sequence; identical to SEQ ID NO: 2516
  Probe

SEQ ID NO: 44344 - DNA, 44 bp, Artificial Sequence; identical to SEQ ID NO: 2520
  Probe

SEQ ID NO: 44345 - DNA, 45 bp, Artificial Sequence; identical to SEQ ID NO: 2521
  Probe

SEQ ID NO: 44346 - DNA, 50 bp, Artificial Sequence; identical to SEQ ID NO: 2523
  Probe

SEQ ID NO: 44347 - DNA, 22 bp, Artificial Sequence
  Probe
aattttggtgcaactccaaata

SEQ ID NO: 44348 - DNA, 50 bp, Artificial Sequence; identical to SEQ ID NO: 2525
  Probe

SEQ ID NO: 44349 - DNA, 27 bp, Artificial Sequence
  Probe
acaaagcacccaacttacacttaggag

SEQ ID NO: 44350 - DNA, 28 bp, Artificial Sequence
  Probe
acaaagcacccaacttacacttaggaga

SEQ ID NO: 44351 - DNA, 29 bp, Artificial Sequence
  Probe
acaaagcacccaacttacacttaggagat

SEQ ID NO: 44352 - DNA, 33 bp, Artificial Sequence; identical to SEQ ID NO: 2538
  Probe

SEQ ID NO: 44353 - DNA, 36 bp, Artificial Sequence; identical to SEQ ID NO: 15324
  Probe

SEQ ID NO: 44354 - DNA, 16 bp, Artificial Sequence
  Probe
acaacagaggcttacg

SEQ ID NO: 44355 - DNA, 17 bp, Artificial Sequence
  Probe
acaacagaggcttacga

SEQ ID NO: 44356 - DNA, 18 bp, Artificial Sequence
  Probe
acaacagaggcttacgac

SEQ ID NO: 44357 - DNA, 19 bp, Artificial Sequence
  Probe
acaacagaggcttacgacc

SEQ ID NO: 44358 - DNA, 20 bp, Artificial Sequence
  Probe
acaacagaggcttacgaccc

SEQ ID NO: 44359 - DNA, 21 bp, Artificial Sequence
  Probe
acaacagaggcttacgacccc

SEQ ID NO: 44360 - DNA, 22 bp, Artificial Sequence
  Probe
acaacagaggcttacgacccct

SEQ ID NO: 44361 - DNA, 23 bp, Artificial Sequence
  Probe
acaacagaggcttacgacccctt

SEQ ID NO: 44362 - DNA, 24 bp, Artificial Sequence
  Probe
acaacagaggcttacgacccctta

SEQ ID NO: 44363 - DNA, 25 bp, Artificial Sequence
  Probe
acaacagaggcttacgaccccttat

SEQ ID NO: 44364 - DNA, 26 bp, Artificial Sequence
  Probe
acaacagaggcttacgaccccttatt

SEQ ID NO: 44365 - DNA, 27 bp, Artificial Sequence
  Probe
acaacagaggcttacgaccccttattt

SEQ ID NO: 44366 - DNA, 28 bp, Artificial Sequence
  Probe
acaacagaggcttacgaccccttattta

SEQ ID NO: 44367 - DNA, 29 bp, Artificial Sequence
  Probe
acaacagaggcttacgaccccttatttac

SEQ ID NO: 44368 - DNA, 31 bp, Artificial Sequence; identical to SEQ ID NO: 2563
  Probe

SEQ ID NO: 44369 - DNA, 32 bp, Artificial Sequence; identical to SEQ ID NO: 2564
  Probe

SEQ ID NO: 44370 - DNA, 33 bp, Artificial Sequence; identical to SEQ ID NO: 2565
  Probe

SEQ ID NO: 44371 - DNA, 34 bp, Artificial Sequence; identical to SEQ ID NO: 2566
  Probe

SEQ ID NO: 44372 - DNA, 35 bp, Artificial Sequence; identical to SEQ ID NO: 2567
  Probe

SEQ ID NO: 44373 - DNA, 36 bp, Artificial Sequence; identical to SEQ ID NO: 2568
  Probe

SEQ ID NO: 44374 - DNA, 37 bp, Artificial Sequence; identical to SEQ ID NO: 2569
  Probe

SEQ ID NO: 44375 - DNA, 38 bp, Artificial Sequence; identical to SEQ ID NO: 2570
  Probe

SEQ ID NO: 44376 - DNA, 19 bp, Artificial Sequence
  Probe
acaacatggctttctcaac

SEQ ID NO: 44377 - DNA, 17 bp, Artificial Sequence
  Probe
acaacattcaaaaaaga

SEQ ID NO: 44378 - DNA, 18 bp, Artificial Sequence
  Probe
acaacattcaaaaaagag

SEQ ID NO: 44379 - DNA, 20 bp, Artificial Sequence
  Probe
acaacattcaaaaaagagta

SEQ ID NO: 44380 - DNA, 21 bp, Artificial Sequence
  Probe
acaacattcaaaaaagagtaa

SEQ ID NO: 44381 - DNA, 28 bp, Artificial Sequence
  Probe
acaacgatggtttttcatatcattggtc

SEQ ID NO: 44382 - DNA, 29 bp, Artificial Sequence
  Probe
acaacgatggtttttcatatcattggtcg

SEQ ID NO: 44383 - DNA, 31 bp, Artificial Sequence
  Probe
acaacgatggtttttcatatcattggtcgtg

SEQ ID NO: 44384 - DNA, 35 bp, Artificial Sequence; identical to SEQ ID NO: 26962
  Probe

SEQ ID NO: 44385 - DNA, 50 bp, Artificial Sequence; identical to SEQ ID NO: 118
  Probe

SEQ ID NO: 44386 - DNA, 17 bp, Artificial Sequence
  Probe
acaagaactgctaactc

SEQ ID NO: 44387 - DNA, 18 bp, Artificial Sequence
  Probe
acaagaactgctaactca

SEQ ID NO: 44388 - DNA, 20 bp, Artificial Sequence
  Probe
acaagaactgctaactcatg

SEQ ID NO: 44389 - DNA, 35 bp, Artificial Sequence; identical to SEQ ID NO: 12517
  Probe

SEQ ID NO: 44390 - DNA, 44 bp, Artificial Sequence; identical to SEQ ID NO: 120
  Probe

SEQ ID NO: 44391 - DNA, 46 bp, Artificial Sequence; identical to SEQ ID NO: 122
  Probe

SEQ ID NO: 44392 - DNA, 49 bp, Artificial Sequence; identical to SEQ ID NO: 2587
  Probe

SEQ ID NO: 44393 - DNA, 50 bp, Artificial Sequence; identical to SEQ ID NO: 2588
  Probe

SEQ ID NO: 44394 - DNA, 16 bp, Artificial Sequence
  Probe
acacaaagcacccaac

SEQ ID NO: 44395 - DNA, 17 bp, Artificial Sequence
  Probe
acacaaagcacccaact

SEQ ID NO: 44396 - DNA, 25 bp, Artificial Sequence
  Probe
acacaaagcacccaacttacactta

SEQ ID NO: 44397 - DNA, 26 bp, Artificial Sequence
  Probe
acacaaagcacccaacttacacttag

SEQ ID NO: 44398 - DNA, 29 bp, Artificial Sequence
  Probe
acacaaagcacccaacttacacttaggag

SEQ ID NO: 44399 - DNA, 31 bp, Artificial Sequence; identical to SEQ ID NO: 2597
  Probe

SEQ ID NO: 44400 - DNA, 33 bp, Artificial Sequence
  Probe
acacaaagcacccaacttacacttaggagattt

SEQ ID NO: 44401 - DNA, 35 bp, Artificial Sequence; identical to SEQ ID NO: 2598
  Probe

SEQ ID NO: 44402 - DNA, 38 bp, Artificial Sequence
  Probe
acacaaagcacccaacttacacttaggagatttcaact

SEQ ID NO: 44403 - DNA, 40 bp, Artificial Sequence
  Probe
acacaaagcacccaacttacacttaggagatttcaactta

SEQ ID NO: 44404 - DNA, 41 bp, Artificial Sequence
  Probe
acacaaagcacccaacttacacttaggagatttcaacttaa

SEQ ID NO: 44405 - DNA, 49 bp, Artificial Sequence; identical to SEQ ID NO: 123
  Probe

SEQ ID NO: 44406 - DNA, 50 bp, Artificial Sequence; identical to SEQ ID NO: 2603
  Probe

SEQ ID NO: 44407 - DNA, 17 bp, Artificial Sequence
  Probe
acacccacccaagaaca

SEQ ID NO: 44408 - DNA, 19 bp, Artificial Sequence
  Probe
acacccacccaagaacagg

SEQ ID NO: 44409 - DNA, 24 bp, Artificial Sequence
  Probe
acacccacccaagaacagggtttg

SEQ ID NO: 44410 - DNA, 25 bp, Artificial Sequence
  Probe
acacccacccaagaacagggtttgt

SEQ ID NO: 44411 - DNA, 26 bp, Artificial Sequence
  Probe
acacccacccaagaacagggtttgtt

SEQ ID NO: 44412 - DNA, 27 bp, Artificial Sequence
  Probe
acacccacccaagaacagggtttgtta

SEQ ID NO: 44413 - DNA, 28 bp, Artificial Sequence
  Probe
acacccacccaagaacagggtttgttaa

SEQ ID NO: 44414 - DNA, 29 bp, Artificial Sequence
  Probe
acacccacccaagaacagggtttgttaag

SEQ ID NO: 44415 - DNA, 30 bp, Artificial Sequence; identical to SEQ ID NO: 15394
  Probe

SEQ ID NO: 44416 - DNA, 23 bp, Artificial Sequence
  Probe
acacctcagaaggtctcactttt

SEQ ID NO: 44417 - DNA, 17 bp, Artificial Sequence
  Probe
acacctctttacagtga

SEQ ID NO: 44418 - DNA, 19 bp, Artificial Sequence
  Probe
acacctctttacagtgaaa

SEQ ID NO: 44419 - DNA, 20 bp, Artificial Sequence
  Probe
acacctctttacagtgaaat

SEQ ID NO: 44420 - DNA, 36 bp, Artificial Sequence; identical to SEQ ID NO: 12522
  Probe

SEQ ID NO: 44421 - DNA, 37 bp, Artificial Sequence; identical to SEQ ID NO: 15407
  Probe

SEQ ID NO: 44422 - DNA, 38 bp, Artificial Sequence; identical to SEQ ID NO: 12523
  Probe

SEQ ID NO: 44423 - DNA, 41 bp, Artificial Sequence; identical to SEQ ID NO: 15408
  Probe

SEQ ID NO: 44424 - DNA, 42 bp, Artificial Sequence; identical to SEQ ID NO: 2613
  Probe

SEQ ID NO: 44425 - DNA, 50 bp, Artificial Sequence
  Probe
acacgcagaaggtcctgggttcgagccccagtggaaccacggcgtgattc

SEQ ID NO: 44426 - DNA, 42 bp, Artificial Sequence; identical to SEQ ID NO: 15410
  Probe

SEQ ID NO: 44427 - DNA, 44 bp, Artificial Sequence
  Probe
acacgcagaaggtcctgggttcgagccccagtggaaccatagcc

SEQ ID NO: 44428 - DNA, 45 bp, Artificial Sequence
  Probe
acacgcagaaggtcctgggttcgagccccagtggaaccatagccg

SEQ ID NO: 44429 - DNA, 50 bp, Artificial Sequence; identical to SEQ ID NO: 15411
  Probe

SEQ ID NO: 44430 - DNA, 16 bp, Artificial Sequence
  Probe
acacgcgaaaggtccc

SEQ ID NO: 44431 - DNA, 36 bp, Artificial Sequence; identical to SEQ ID NO: 12531
  Probe

SEQ ID NO: 44432 - DNA, 39 bp, Artificial Sequence
  Probe
acacgcgaaaggtccccggttcgaaaccgggcggaaaca

SEQ ID NO: 44433 - DNA, 41 bp, Artificial Sequence
  Probe
acacgcgaaaggtccccggttcgaaaccgggcggaaacacc

SEQ ID NO: 44434 - DNA, 42 bp, Artificial Sequence; identical to SEQ ID NO: 15415
  Probe

SEQ ID NO: 44435 - DNA, 50 bp, Artificial Sequence
  Probe
acacgcgaaaggtccccggttcgaaaccgggcggaaacacgttttttttt

SEQ ID NO: 44436 - DNA, 25 bp, Artificial Sequence
  Probe
acacgcgaaaggtccccggttcgat

SEQ ID NO: 44437 - DNA, 41 bp, Artificial Sequence
  Probe
acacgcgaaaggtccccggttcgatcccgggcggaaacagg

SEQ ID NO: 44438 - DNA, 42 bp, Artificial Sequence; identical to SEQ ID NO: 37794
  Probe

SEQ ID NO: 44439 - DNA, 19 bp, Artificial Sequence
  Probe
acacggggcacaataattt

SEQ ID NO: 44440 - DNA, 20 bp, Artificial Sequence
  Probe
acactactataaccacccta

SEQ ID NO: 44441 - DNA, 44 bp, Artificial Sequence; identical to SEQ ID NO: 2618
  Probe

SEQ ID NO: 44442 - DNA, 45 bp, Artificial Sequence; identical to SEQ ID NO: 2619
  Probe

SEQ ID NO: 44443 - DNA, 46 bp, Artificial Sequence; identical to SEQ ID NO: 2620
  Probe

SEQ ID NO: 44444 - DNA, 50 bp, Artificial Sequence; identical to SEQ ID NO: 2621
  Probe

SEQ ID NO: 44445 - DNA, 18 bp, Artificial Sequence
  Probe
acacttaggagatttcaa

SEQ ID NO: 44446 - DNA, 20 bp, Artificial Sequence
  Probe
acacttaggagatttcaact

SEQ ID NO: 44447 - DNA, 22 bp, Artificial Sequence
  Probe
acacttaggagatttcaactta

SEQ ID NO: 44448 - DNA, 25 bp, Artificial Sequence
  Probe
acacttaggagatttcaacttaact

SEQ ID NO: 44449 - DNA, 27 bp, Artificial Sequence
  Probe
acacttaggagatttcaacttaacttg

SEQ ID NO: 44450 - DNA, 28 bp, Artificial Sequence
  Probe
acacttaggagatttcaacttaacttga

SEQ ID NO: 44451 - DNA, 29 bp, Artificial Sequence
  Probe
acacttaggagatttcaacttaacttgac

SEQ ID NO: 44452 - DNA, 30 bp, Artificial Sequence; identical to SEQ ID NO: 8999
  Probe

SEQ ID NO: 44453 - DNA, 31 bp, Artificial Sequence; identical to SEQ ID NO: 2625
  Probe

SEQ ID NO: 44454 - DNA, 32 bp, Artificial Sequence; identical to SEQ ID NO: 2626
  Probe

SEQ ID NO: 44455 - DNA, 33 bp, Artificial Sequence; identical to SEQ ID NO: 2627
  Probe

SEQ ID NO: 44456 - DNA, 34 bp, Artificial Sequence; identical to SEQ ID NO: 2628
  Probe

SEQ ID NO: 44457 - DNA, 35 bp, Artificial Sequence; identical to SEQ ID NO: 15431
  Probe

SEQ ID NO: 44458 - DNA, 36 bp, Artificial Sequence; identical to SEQ ID NO: 27021
  Probe

SEQ ID NO: 44459 - DNA, 37 bp, Artificial Sequence; identical to SEQ ID NO: 2629
  Probe

SEQ ID NO: 44460 - DNA, 38 bp, Artificial Sequence; identical to SEQ ID NO: 2630
  Probe

SEQ ID NO: 44461 - DNA, 39 bp, Artificial Sequence; identical to SEQ ID NO: 2631
  Probe

SEQ ID NO: 44462 - DNA, 40 bp, Artificial Sequence; identical to SEQ ID NO: 2632
  Probe

SEQ ID NO: 44463 - DNA, 41 bp, Artificial Sequence; identical to SEQ ID NO: 2633
  Probe

SEQ ID NO: 44464 - DNA, 42 bp, Artificial Sequence; identical to SEQ ID NO: 2634
  Probe

SEQ ID NO: 44465 - DNA, 17 bp, Artificial Sequence
  Probe
acagaccaagagccttc

SEQ ID NO: 44466 - DNA, 30 bp, Artificial Sequence; identical to SEQ ID NO: 27031
  Probe

SEQ ID NO: 44467 - DNA, 37 bp, Artificial Sequence; identical to SEQ ID NO: 12533
  Probe

SEQ ID NO: 44468 - DNA, 50 bp, Artificial Sequence; identical to SEQ ID NO: 129
  Probe

SEQ ID NO: 44469 - DNA, 18 bp, Artificial Sequence
  Probe
acagaggcttacgacccc

SEQ ID NO: 44470 - DNA, 28 bp, Artificial Sequence
  Probe
acagaggcttacgaccccttatttaccg

SEQ ID NO: 44471 - DNA, 30 bp, Artificial Sequence; identical to SEQ ID NO: 2640
  Probe

SEQ ID NO: 44472 - DNA, 16 bp, Artificial Sequence
  Probe
acagctatccattggt

SEQ ID NO: 44473 - DNA, 26 bp, Artificial Sequence
  Probe
acagctatccattggtcttaggcccc

SEQ ID NO: 44474 - DNA, 27 bp, Artificial Sequence
  Probe
acagctatccattggtcttaggcccca

SEQ ID NO: 44475 - DNA, 28 bp, Artificial Sequence
  Probe
acagctatccattggtcttaggccccaa

SEQ ID NO: 44476 - DNA, 49 bp, Artificial Sequence; identical to SEQ ID NO: 2643
  Probe

SEQ ID NO: 44477 - DNA, 50 bp, Artificial Sequence; identical to SEQ ID NO: 2644
  Probe

SEQ ID NO: 44478 - DNA, 35 bp, Artificial Sequence; identical to SEQ ID NO: 15458
  Probe

SEQ ID NO: 44479 - DNA, 32 bp, Artificial Sequence; identical to SEQ ID NO: 15463
  Probe

SEQ ID NO: 44480 - DNA, 33 bp, Artificial Sequence; identical to SEQ ID NO: 2645
  Probe

SEQ ID NO: 44481 - DNA, 34 bp, Artificial Sequence; identical to SEQ ID NO: 15465
  Probe

SEQ ID NO: 44482 - DNA, 35 bp, Artificial Sequence; identical to SEQ ID NO: 2646
  Probe

SEQ ID NO: 44483 - DNA, 38 bp, Artificial Sequence; identical to SEQ ID NO: 2648
  Probe

SEQ ID NO: 44484 - DNA, 28 bp, Artificial Sequence
  Probe
acaggggttaggcctctttttaccagct

SEQ ID NO: 44485 - DNA, 18 bp, Artificial Sequence
  Probe
acagtcagaggttcaatt

SEQ ID NO: 44486 - DNA, 19 bp, Artificial Sequence
  Probe
acagtcagaggttcaattc

SEQ ID NO: 44487 - DNA, 23 bp, Artificial Sequence
  Probe
acagtcagaggttcaattcctct

SEQ ID NO: 44488 - DNA, 25 bp, Artificial Sequence
  Probe
acagtcagaggttcaattcctcttc

SEQ ID NO: 44489 - DNA, 26 bp, Artificial Sequence
  Probe
acagtcagaggttcaattcctcttct

SEQ ID NO: 44490 - DNA, 27 bp, Artificial Sequence
  Probe
acagtcagaggttcaattcctcttctt

SEQ ID NO: 44491 - DNA, 28 bp, Artificial Sequence
  Probe
acagtcagaggttcaattcctcttctta

SEQ ID NO: 44492 - DNA, 29 bp, Artificial Sequence
  Probe
acagtcagaggttcaattcctcttcttaa

SEQ ID NO: 44493 - DNA, 30 bp, Artificial Sequence; identical to SEQ ID NO: 15478
  Probe

SEQ ID NO: 44494 - DNA, 31 bp, Artificial Sequence; identical to SEQ ID NO: 2654
  Probe

SEQ ID NO: 44495 - DNA, 33 bp, Artificial Sequence; identical to SEQ ID NO: 2655
  Probe

SEQ ID NO: 44496 - DNA, 34 bp, Artificial Sequence; identical to SEQ ID NO: 2656
  Probe

SEQ ID NO: 44497 - DNA, 20 bp, Artificial Sequence
  Probe
acatacccatggccaacctc

SEQ ID NO: 44498 - DNA, 21 bp, Artificial Sequence
  Probe
acatacccatggccaacctcc

SEQ ID NO: 44499 - DNA, 22 bp, Artificial Sequence
  Probe
acatacccatggccaacctcct

SEQ ID NO: 44500 - DNA, 25 bp, Artificial Sequence
  Probe
acatacccatggccaacctcctact

SEQ ID NO: 44501 - DNA, 26 bp, Artificial Sequence
  Probe
acatacccatggccaacctcctactc

SEQ ID NO: 44502 - DNA, 27 bp, Artificial Sequence
  Probe
acatacccatggccaacctcctactcc

SEQ ID NO: 44503 - DNA, 28 bp, Artificial Sequence
  Probe
acatacccatggccaacctcctactcct

SEQ ID NO: 44504 - DNA, 29 bp, Artificial Sequence
  Probe
acatacccatggccaacctcctactcctc

SEQ ID NO: 44505 - DNA, 30 bp, Artificial Sequence; identical to SEQ ID NO: 2668
  Probe

SEQ ID NO: 44506 - DNA, 17 bp, Artificial Sequence
  Probe
acatcaccccataaaca

SEQ ID NO: 44507 - DNA, 18 bp, Artificial Sequence
  Probe
acatcaccccataaacaa

SEQ ID NO: 44508 - DNA, 19 bp, Artificial Sequence
  Probe
acatcaccccataaacaaa

SEQ ID NO: 44509 - DNA, 20 bp, Artificial Sequence
  Probe
acatcaccccataaacaaat

SEQ ID NO: 44510 - DNA, 45 bp, Artificial Sequence; identical to SEQ ID NO: 2683
  Probe

SEQ ID NO: 44511 - DNA, 50 bp, Artificial Sequence; identical to SEQ ID NO: 2685
  Probe

SEQ ID NO: 44512 - DNA, 28 bp, Artificial Sequence
  Probe
accaaaacatcagattgtgaatctgaca

SEQ ID NO: 44513 - DNA, 30 bp, Artificial Sequence; identical to SEQ ID NO: 2694
  Probe

SEQ ID NO: 44514 - DNA, 31 bp, Artificial Sequence; identical to SEQ ID NO: 2695
  Probe

SEQ ID NO: 44515 - DNA, 32 bp, Artificial Sequence; identical to SEQ ID NO: 15519
  Probe

SEQ ID NO: 44516 - DNA, 33 bp, Artificial Sequence; identical to SEQ ID NO: 15520
  Probe

SEQ ID NO: 44517 - DNA, 34 bp, Artificial Sequence; identical to SEQ ID NO: 15521
  Probe

SEQ ID NO: 44518 - DNA, 35 bp, Artificial Sequence; identical to SEQ ID NO: 2696
  Probe

SEQ ID NO: 44519 - DNA, 36 bp, Artificial Sequence; identical to SEQ ID NO: 15522
  Probe

SEQ ID NO: 44520 - DNA, 37 bp, Artificial Sequence; identical to SEQ ID NO: 2697
  Probe

SEQ ID NO: 44521 - DNA, 45 bp, Artificial Sequence; identical to SEQ ID NO: 2700
  Probe

SEQ ID NO: 44522 - DNA, 46 bp, Artificial Sequence; identical to SEQ ID NO: 136
  Probe

SEQ ID NO: 44523 - DNA, 49 bp, Artificial Sequence; identical to SEQ ID NO: 137
  Probe

SEQ ID NO: 44524 - DNA, 20 bp, Artificial Sequence
  Probe
accaacacctctttacagtg

SEQ ID NO: 44525 - DNA, 21 bp, Artificial Sequence
  Probe
accaacacctctttacagtga

SEQ ID NO: 44526 - DNA, 22 bp, Artificial Sequence
  Probe
accaacacctctttacagtgaa

SEQ ID NO: 44527 - DNA, 23 bp, Artificial Sequence
  Probe
accaacacctctttacagtgaaa

SEQ ID NO: 44528 - DNA, 24 bp, Artificial Sequence
  Probe
accaacacctctttacagtgaaat

SEQ ID NO: 44529 - DNA, 18 bp, Artificial Sequence
  Probe
accagaatggccgagtgg

SEQ ID NO: 44530 - DNA, 20 bp, Artificial Sequence
  Probe
accagaatggccgagtggtt

SEQ ID NO: 44531 - DNA, 18 bp, Artificial Sequence
  Probe
accagctttggggggttc

SEQ ID NO: 44532 - DNA, 31 bp, Artificial Sequence; identical to SEQ ID NO: 2713
  Probe

SEQ ID NO: 44533 - DNA, 33 bp, Artificial Sequence; identical to SEQ ID NO: 2715
  Probe

SEQ ID NO: 44534 - DNA, 34 bp, Artificial Sequence; identical to SEQ ID NO: 2716
  Probe

SEQ ID NO: 44535 - DNA, 35 bp, Artificial Sequence; identical to SEQ ID NO: 2717
  Probe

SEQ ID NO: 44536 - DNA, 36 bp, Artificial Sequence; identical to SEQ ID NO: 2718
  Probe

SEQ ID NO: 44537 - DNA, 37 bp, Artificial Sequence; identical to SEQ ID NO: 2719
  Probe

SEQ ID NO: 44538 - DNA, 38 bp, Artificial Sequence; identical to SEQ ID NO: 2720
  Probe

SEQ ID NO: 44539 - DNA, 39 bp, Artificial Sequence; identical to SEQ ID NO: 2721
  Probe

SEQ ID NO: 44540 - DNA, 18 bp, Artificial Sequence
  Probe
accaggatggccgagtgg

SEQ ID NO: 44541 - DNA, 19 bp, Artificial Sequence
  Probe
accaggatggccgagtggt

SEQ ID NO: 44542 - DNA, 20 bp, Artificial Sequence
  Probe
accaggatggccgagtggtt

SEQ ID NO: 44543 - DNA, 21 bp, Artificial Sequence
  Probe
accaggatggccgagtggtta

SEQ ID NO: 44544 - DNA, 22 bp, Artificial Sequence
  Probe
accaggatggccgagtggttaa

SEQ ID NO: 44545 - DNA, 23 bp, Artificial Sequence
  Probe
accaggatggccgagtggttaag

SEQ ID NO: 44546 - DNA, 24 bp, Artificial Sequence
  Probe
accaggatggccgagtggttaagg

SEQ ID NO: 44547 - DNA, 36 bp, Artificial Sequence; identical to SEQ ID NO: 12541
  Probe

SEQ ID NO: 44548 - DNA, 38 bp, Artificial Sequence; identical to SEQ ID NO: 2727
  Probe

SEQ ID NO: 44549 - DNA, 38 bp, Artificial Sequence; identical to SEQ ID NO: 2728
  Probe

SEQ ID NO: 44550 - DNA, 46 bp, Artificial Sequence; identical to SEQ ID NO: 2729
  Probe

SEQ ID NO: 44551 - DNA, 27 bp, Artificial Sequence
  Probe
accatgcacactactataaccacccta

SEQ ID NO: 44552 - DNA, 20 bp, Artificial Sequence
  Probe
accatttcataactttgtca

SEQ ID NO: 44553 - DNA, 17 bp, Artificial Sequence
  Probe
acccaacttacacttag

SEQ ID NO: 44554 - DNA, 18 bp, Artificial Sequence
  Probe
acccaacttacacttagg

SEQ ID NO: 44555 - DNA, 20 bp, Artificial Sequence
  Probe
acccaacttacacttaggag

SEQ ID NO: 44556 - DNA, 21 bp, Artificial Sequence
  Probe
acccaacttacacttaggaga

SEQ ID NO: 44557 - DNA, 23 bp, Artificial Sequence
  Probe
acccaacttacacttaggagatt

SEQ ID NO: 44558 - DNA, 26 bp, Artificial Sequence
  Probe
acccaacttacacttaggagatttca

SEQ ID NO: 44559 - DNA, 29 bp, Artificial Sequence
  Probe
acccaacttacacttaggagatttcaact

SEQ ID NO: 44560 - DNA, 31 bp, Artificial Sequence; identical to SEQ ID NO: 2740
  Probe

SEQ ID NO: 44561 - DNA, 34 bp, Artificial Sequence; identical to SEQ ID NO: 15563
  Probe

SEQ ID NO: 44562 - DNA, 39 bp, Artificial Sequence; identical to SEQ ID NO: 15564
  Probe

SEQ ID NO: 44563 - DNA, 40 bp, Artificial Sequence; identical to SEQ ID NO: 2743
  Probe

SEQ ID NO: 44564 - DNA, 41 bp, Artificial Sequence
  Probe
acccaacttacacttaggagatttcaacttaacttgaccgc

SEQ ID NO: 44565 - DNA, 42 bp, Artificial Sequence; identical to SEQ ID NO: 2744
  Probe

SEQ ID NO: 44566 - DNA, 44 bp, Artificial Sequence
  Probe
acccaacttacacttaggagatttcaacttaacttgaccgctct

SEQ ID NO: 44567 - DNA, 46 bp, Artificial Sequence; identical to SEQ ID NO: 2747
  Probe

SEQ ID NO: 44568 - DNA, 49 bp, Artificial Sequence; identical to SEQ ID NO: 2748
  Probe

SEQ ID NO: 44569 - DNA, 50 bp, Artificial Sequence; identical to SEQ ID NO: 2749
  Probe

SEQ ID NO: 44570 - DNA, 31 bp, Artificial Sequence; identical to SEQ ID NO: 2755
  Probe

SEQ ID NO: 44571 - DNA, 25 bp, Artificial Sequence
  Probe
acccacccaagaacagggtttgtta

SEQ ID NO: 44572 - DNA, 20 bp, Artificial Sequence
  Probe
acccagaggtcgatggatcg

SEQ ID NO: 44573 - DNA, 21 bp, Artificial Sequence
  Probe
acccagaggtcgatggatcga

SEQ ID NO: 44574 - DNA, 39 bp, Artificial Sequence; identical to SEQ ID NO: 2760
  Probe

SEQ ID NO: 44575 - DNA, 38 bp, Artificial Sequence; identical to SEQ ID NO: 2761
  Probe

SEQ ID NO: 44576 - DNA, 33 bp, Artificial Sequence; identical to SEQ ID NO: 2762
  Probe

SEQ ID NO: 44577 - DNA, 33 bp, Artificial Sequence; identical to SEQ ID NO: 2763
  Probe

SEQ ID NO: 44578 - DNA, 35 bp, Artificial Sequence; identical to SEQ ID NO: 149
  Probe

SEQ ID NO: 44579 - DNA, 37 bp, Artificial Sequence; identical to SEQ ID NO: 151
  Probe

SEQ ID NO: 44580 - DNA, 39 bp, Artificial Sequence; identical to SEQ ID NO: 2764
  Probe

SEQ ID NO: 44581 - DNA, 35 bp, Artificial Sequence; identical to SEQ ID NO: 15599
  Probe

SEQ ID NO: 44582 - DNA, 39 bp, Artificial Sequence; identical to SEQ ID NO: 2766
  Probe

SEQ ID NO: 44583 - DNA, 30 bp, Artificial Sequence
  Probe
acccagtggcctaatggataaggcatcagc

SEQ ID NO: 44584 - DNA, 24 bp, Artificial Sequence
  Probe
accccgaaaatgttggttataccc

SEQ ID NO: 44585 - DNA, 28 bp, Artificial Sequence
  Probe
accccgaaaatgttggttatacccttcc

SEQ ID NO: 44586 - DNA, 29 bp, Artificial Sequence
  Probe
accccgaaaatgttggttatacccttccc

SEQ ID NO: 44587 - DNA, 30 bp, Artificial Sequence; identical to SEQ ID NO: 2769
  Probe

SEQ ID NO: 44588 - DNA, 31 bp, Artificial Sequence; identical to SEQ ID NO: 2770
  Probe

SEQ ID NO: 44589 - DNA, 36 bp, Artificial Sequence; identical to SEQ ID NO: 2771
  Probe

SEQ ID NO: 44590 - DNA, 37 bp, Artificial Sequence; identical to SEQ ID NO: 2772
  Probe

SEQ ID NO: 44591 - DNA, 38 bp, Artificial Sequence; identical to SEQ ID NO: 2773
  Probe

SEQ ID NO: 44592 - DNA, 17 bp, Artificial Sequence
  Probe
accccgacatcattacc

SEQ ID NO: 44593 - DNA, 18 bp, Artificial Sequence
  Probe
accccgacatcattaccg

SEQ ID NO: 44594 - DNA, 22 bp, Artificial Sequence
  Probe
accccgacatcattaccgggtt

SEQ ID NO: 44595 - DNA, 23 bp, Artificial Sequence
  Probe
accccgacatcattaccgggttt

SEQ ID NO: 44596 - DNA, 26 bp, Artificial Sequence
  Probe
accccgacatcattaccgggttttcc

SEQ ID NO: 44597 - DNA, 27 bp, Artificial Sequence
  Probe
accccgacatcattaccgggttttcct

SEQ ID NO: 44598 - DNA, 28 bp, Artificial Sequence
  Probe
accccgacatcattaccgggttttcctc

SEQ ID NO: 44599 - DNA, 27 bp, Artificial Sequence
  Probe
acccgggttcgattcccggccaacgca

SEQ ID NO: 44600 - DNA, 30 bp, Artificial Sequence; identical to SEQ ID NO: 15633
  Probe

SEQ ID NO: 44601 - DNA, 30 bp, Artificial Sequence; identical to SEQ ID NO: 15634
  Probe

SEQ ID NO: 44602 - DNA, 18 bp, Artificial Sequence
  Probe
accctgtggtctagtggt

SEQ ID NO: 44603 - DNA, 19 bp, Artificial Sequence
  Probe
accctgtggtctagtggtt

SEQ ID NO: 44604 - DNA, 20 bp, Artificial Sequence
  Probe
accctgtggtctagtggtta

SEQ ID NO: 44605 - DNA, 21 bp, Artificial Sequence
  Probe
accctgtggtctagtggttag

SEQ ID NO: 44606 - DNA, 22 bp, Artificial Sequence
  Probe
accctgtggtctagtggttagg

SEQ ID NO: 44607 - DNA, 23 bp, Artificial Sequence
  Probe
accctgtggtctagtggttagga

SEQ ID NO: 44608 - DNA, 35 bp, Artificial Sequence
  Probe
accgaaaggttggtggttcgagcccacccagggac

SEQ ID NO: 44609 - DNA, 39 bp, Artificial Sequence; identical to SEQ ID NO: 2787
  Probe

SEQ ID NO: 44610 - DNA, 39 bp, Artificial Sequence
  Probe
accgaaaggttggtggttcgagcccacccagggacgcta

SEQ ID NO: 44611 - DNA, 37 bp, Artificial Sequence
  Probe
accgaaaggttggtggttcgatcccacccagggacgg

SEQ ID NO: 44612 - DNA, 27 bp, Artificial Sequence
  Probe
accgagcgtccaagctctttccatttt

SEQ ID NO: 44613 - DNA, 37 bp, Artificial Sequence; identical to SEQ ID NO: 15653
  Probe

SEQ ID NO: 44614 - DNA, 39 bp, Artificial Sequence; identical to SEQ ID NO: 2791
  Probe

SEQ ID NO: 44615 - DNA, 36 bp, Artificial Sequence; identical to SEQ ID NO: 12559
  Probe

SEQ ID NO: 44616 - DNA, 37 bp, Artificial Sequence; identical to SEQ ID NO: 2792
  Probe

SEQ ID NO: 44617 - DNA, 37 bp, Artificial Sequence; identical to SEQ ID NO: 2793
  Probe

SEQ ID NO: 44618 - DNA, 38 bp, Artificial Sequence; identical to SEQ ID NO: 15664
  Probe

SEQ ID NO: 44619 - DNA, 39 bp, Artificial Sequence; identical to SEQ ID NO: 2794
  Probe

SEQ ID NO: 44620 - DNA, 37 bp, Artificial Sequence; identical to SEQ ID NO: 2796
  Probe

SEQ ID NO: 44621 - DNA, 39 bp, Artificial Sequence; identical to SEQ ID NO: 2797
  Probe

SEQ ID NO: 44622 - DNA, 36 bp, Artificial Sequence; identical to SEQ ID NO: 15674
  Probe

SEQ ID NO: 44623 - DNA, 25 bp, Artificial Sequence
  Probe
accggagatgaaaacctttttccaa

SEQ ID NO: 44624 - DNA, 27 bp, Artificial Sequence
  Probe
accggagatgaaaacctttttccaagg

SEQ ID NO: 44625 - DNA, 31 bp, Artificial Sequence; identical to SEQ ID NO: 2802
  Probe

SEQ ID NO: 44626 - DNA, 32 bp, Artificial Sequence; identical to SEQ ID NO: 2803
  Probe

SEQ ID NO: 44627 - DNA, 33 bp, Artificial Sequence; identical to SEQ ID NO: 2804
  Probe

SEQ ID NO: 44628 - DNA, 17 bp, Artificial Sequence
  Probe
accgggcggaaacacct

SEQ ID NO: 44629 - DNA, 19 bp, Artificial Sequence
  Probe
accgggcggaaacacctcc

SEQ ID NO: 44630 - DNA, 28 bp, Artificial Sequence
  Probe
accggggttcaattccccgacggggagg

SEQ ID NO: 44631 - DNA, 30 bp, Artificial Sequence; identical to SEQ ID NO: 2808
  Probe

SEQ ID NO: 44632 - DNA, 23 bp, Artificial Sequence
  Probe
accggggttcgattccccgacgg

SEQ ID NO: 44633 - DNA, 28 bp, Artificial Sequence
  Probe
accggggttcgattccccgacggggaga

SEQ ID NO: 44634 - DNA, 28 bp, Artificial Sequence
  Probe
accggggttcgattccccgacggggagg

SEQ ID NO: 44635 - DNA, 30 bp, Artificial Sequence; identical to SEQ ID NO: 2811
  Probe

SEQ ID NO: 44636 - DNA, 31 bp, Artificial Sequence; identical to SEQ ID NO: 2814
  Probe

SEQ ID NO: 44637 - DNA, 32 bp, Artificial Sequence
  Probe
accgttaacttccaattaactagttttgacaa

SEQ ID NO: 44638 - DNA, 45 bp, Artificial Sequence
  Probe
accgttaacttccaattaactagttttgacaacattcaaaaaaga

SEQ ID NO: 44639 - DNA, 50 bp, Artificial Sequence; identical to SEQ ID NO: 2815
  Probe

SEQ ID NO: 44640 - DNA, 25 bp, Artificial Sequence
  Probe
acctagccccaaacccactccacct

SEQ ID NO: 44641 - DNA, 16 bp, Artificial Sequence
  Probe
acctattctcaaactt

SEQ ID NO: 44642 - DNA, 17 bp, Artificial Sequence
  Probe
acctattctcaaacttt

SEQ ID NO: 44643 - DNA, 18 bp, Artificial Sequence
  Probe
acctattctcaaacttta

SEQ ID NO: 44644 - DNA, 19 bp, Artificial Sequence
  Probe
acctattctcaaactttaa

SEQ ID NO: 44645 - DNA, 20 bp, Artificial Sequence
  Probe
acctattctcaaactttaaa

SEQ ID NO: 44646 - DNA, 21 bp, Artificial Sequence
  Probe
acctattctcaaactttaaat

SEQ ID NO: 44647 - DNA, 22 bp, Artificial Sequence
  Probe
acctattctcaaactttaaatg

SEQ ID NO: 44648 - DNA, 23 bp, Artificial Sequence
  Probe
acctattctcaaactttaaatgg

SEQ ID NO: 44649 - DNA, 25 bp, Artificial Sequence
  Probe
acctattctcaaactttaaatgggc

SEQ ID NO: 44650 - DNA, 26 bp, Artificial Sequence
  Probe
acctattctcaaactttaaatgggca

SEQ ID NO: 44651 - DNA, 28 bp, Artificial Sequence
  Probe
acctattctcaaactttaaatgggcaag

SEQ ID NO: 44652 - DNA, 31 bp, Artificial Sequence; identical to SEQ ID NO: 15733
  Probe

SEQ ID NO: 44653 - DNA, 32 bp, Artificial Sequence; identical to SEQ ID NO: 2827
  Probe

SEQ ID NO: 44654 - DNA, 33 bp, Artificial Sequence; identical to SEQ ID NO: 2828
  Probe

SEQ ID NO: 44655 - DNA, 34 bp, Artificial Sequence; identical to SEQ ID NO: 15736
  Probe

SEQ ID NO: 44656 - DNA, 35 bp, Artificial Sequence; identical to SEQ ID NO: 15737
  Probe

SEQ ID NO: 44657 - DNA, 36 bp, Artificial Sequence; identical to SEQ ID NO: 2829
  Probe

SEQ ID NO: 44658 - DNA, 37 bp, Artificial Sequence; identical to SEQ ID NO: 2830
  Probe

SEQ ID NO: 44659 - DNA, 38 bp, Artificial Sequence; identical to SEQ ID NO: 15740
  Probe

SEQ ID NO: 44660 - DNA, 20 bp, Artificial Sequence
  Probe
acctcagaaggtctcacttt

SEQ ID NO: 44661 - DNA, 21 bp, Artificial Sequence
  Probe
acctcagaaggtctcactttt

SEQ ID NO: 44662 - DNA, 22 bp, Artificial Sequence
  Probe
acctcagaaggtctcacttttc

SEQ ID NO: 44663 - DNA, 19 bp, Artificial Sequence
  Probe
acctcctcaaagcaataca

SEQ ID NO: 44664 - DNA, 22 bp, Artificial Sequence
  Probe
acctcctcaaagcaatacactg

SEQ ID NO: 44665 - DNA, 27 bp, Artificial Sequence
  Probe
acctcggttcgaatccgagtcacggca

SEQ ID NO: 44666 - DNA, 50 bp, Artificial Sequence; identical to SEQ ID NO: 15759
  Probe

SEQ ID NO: 44667 - DNA, 28 bp, Artificial Sequence
  Probe
accttttaagttaaagattaagagaacc

SEQ ID NO: 44668 - DNA, 29 bp, Artificial Sequence
  Probe
accttttaagttaaagattaagagaacca

SEQ ID NO: 44669 - DNA, 34 bp, Artificial Sequence; identical to SEQ ID NO: 27258
  Probe

SEQ ID NO: 44670 - DNA, 46 bp, Artificial Sequence; identical to SEQ ID NO: 2839
  Probe

SEQ ID NO: 44671 - DNA, 50 bp, Artificial Sequence; identical to SEQ ID NO: 2840
  Probe

SEQ ID NO: 44672 - DNA, 50 bp, Artificial Sequence; identical to SEQ ID NO: 2841
  Probe

SEQ ID NO: 44673 - DNA, 18 bp, Artificial Sequence
  Probe
acgaccccttatttaccg

SEQ ID NO: 44674 - DNA, 18 bp, Artificial Sequence
  Probe
acgatggtttttcatatc

SEQ ID NO: 44675 - DNA, 26 bp, Artificial Sequence
  Probe
acgatggtttttcatatcattggtcg

SEQ ID NO: 44676 - DNA, 27 bp, Artificial Sequence
  Probe
acgatggtttttcatatcattggtcgt

SEQ ID NO: 44677 - DNA, 45 bp, Artificial Sequence
  Probe
acgatggtttttcatatcattggtcgtggttgtagtccgtgcgag

SEQ ID NO: 44678 - DNA, 50 bp, Artificial Sequence; identical to SEQ ID NO: 2843
  Probe

SEQ ID NO: 44679 - DNA, 18 bp, Artificial Sequence
  Probe
acgcagaaggtcctgggt

SEQ ID NO: 44680 - DNA, 34 bp, Artificial Sequence; identical to SEQ ID NO: 12574
  Probe

SEQ ID NO: 44681 - DNA, 39 bp, Artificial Sequence; identical to SEQ ID NO: 2845
  Probe

SEQ ID NO: 44682 - DNA, 40 bp, Artificial Sequence; identical to SEQ ID NO: 2846
  Probe

SEQ ID NO: 44683 - DNA, 50 bp, Artificial Sequence
  Probe
acgcagaaggtcctgggttcgagccccagtggaaccacggcgtgattcat

SEQ ID NO: 44684 - DNA, 40 bp, Artificial Sequence; identical to SEQ ID NO: 2847
  Probe

SEQ ID NO: 44685 - DNA, 34 bp, Artificial Sequence
  Probe
acgccaaggtcgcgggttcgatccccgtacgggc

SEQ ID NO: 44686 - DNA, 36 bp, Artificial Sequence
  Probe
acgccaaggtcgcgggttcgatccccgtacgggcca

SEQ ID NO: 44687 - DNA, 39 bp, Artificial Sequence; identical to SEQ ID NO: 2849
  Probe

SEQ ID NO: 44688 - DNA, 39 bp, Artificial Sequence; identical to SEQ ID NO: 2850
  Probe

SEQ ID NO: 44689 - DNA, 38 bp, Artificial Sequence
  Probe
acgccaaggtcgcgggttcgatccccgtacgggccagg

SEQ ID NO: 44690 - DNA, 39 bp, Artificial Sequence; identical to SEQ ID NO: 2851
  Probe

SEQ ID NO: 44691 - DNA, 39 bp, Artificial Sequence; identical to SEQ ID NO: 2852
  Probe

SEQ ID NO: 44692 - DNA, 16 bp, Artificial Sequence
  Probe
acgcgaaaggtccccg

SEQ ID NO: 44693 - DNA, 17 bp, Artificial Sequence
  Probe
acgcgaaaggtccccgg

SEQ ID NO: 44694 - DNA, 33 bp, Artificial Sequence
  Probe
acgcgaaaggtccccggttcgaaaccgggcgga

SEQ ID NO: 44695 - DNA, 35 bp, Artificial Sequence
  Probe
acgcgaaaggtccccggttcgaaaccgggcggaaa

SEQ ID NO: 44696 - DNA, 37 bp, Artificial Sequence; identical to SEQ ID NO: 15792
  Probe

SEQ ID NO: 44697 - DNA, 39 bp, Artificial Sequence; identical to SEQ ID NO: 173
  Probe

SEQ ID NO: 44698 - DNA, 40 bp, Artificial Sequence; identical to SEQ ID NO: 2854
  Probe

SEQ ID NO: 44699 - DNA, 39 bp, Artificial Sequence; identical to SEQ ID NO: 15797
  Probe

SEQ ID NO: 44700 - DNA, 40 bp, Artificial Sequence; identical to SEQ ID NO: 2855
  Probe

SEQ ID NO: 44701 - DNA, 19 bp, Artificial Sequence
  Probe
acgcgggagaccggggttc

SEQ ID NO: 44702 - DNA, 37 bp, Artificial Sequence; identical to SEQ ID NO: 2859
  Probe

SEQ ID NO: 44703 - DNA, 38 bp, Artificial Sequence; identical to SEQ ID NO: 2860
  Probe

SEQ ID NO: 44704 - DNA, 39 bp, Artificial Sequence; identical to SEQ ID NO: 2861
  Probe

SEQ ID NO: 44705 - DNA, 21 bp, Artificial Sequence
  Probe
acgcgggagaccggggttcga

SEQ ID NO: 44706 - DNA, 22 bp, Artificial Sequence
  Probe
acgcgggagaccggggttcgat

SEQ ID NO: 44707 - DNA, 23 bp, Artificial Sequence
  Probe
acgcgggagaccggggttcgatt

SEQ ID NO: 44708 - DNA, 39 bp, Artificial Sequence; identical to SEQ ID NO: 2864
  Probe

SEQ ID NO: 44709 - DNA, 29 bp, Artificial Sequence
  Probe
acgcgggagaccggggttcgattccccga

SEQ ID NO: 44710 - DNA, 30 bp, Artificial Sequence; identical to SEQ ID NO: 182
  Probe

SEQ ID NO: 44711 - DNA, 37 bp, Artificial Sequence; identical to SEQ ID NO: 2865
  Probe

SEQ ID NO: 44712 - DNA, 38 bp, Artificial Sequence; identical to SEQ ID NO: 2866
  Probe

SEQ ID NO: 44713 - DNA, 39 bp, Artificial Sequence; identical to SEQ ID NO: 2867
  Probe

SEQ ID NO: 44714 - DNA, 38 bp, Artificial Sequence; identical to SEQ ID NO: 2869
  Probe

SEQ ID NO: 44715 - DNA, 39 bp, Artificial Sequence; identical to SEQ ID NO: 2870
  Probe

SEQ ID NO: 44716 - DNA, 39 bp, Artificial Sequence; identical to SEQ ID NO: 2871
  Probe

SEQ ID NO: 44717 - DNA, 37 bp, Artificial Sequence; identical to SEQ ID NO: 2872
  Probe

SEQ ID NO: 44718 - DNA, 38 bp, Artificial Sequence; identical to SEQ ID NO: 15833
  Probe

SEQ ID NO: 44719 - DNA, 38 bp, Artificial Sequence; identical to SEQ ID NO: 2873
  Probe

SEQ ID NO: 44720 - DNA, 39 bp, Artificial Sequence; identical to SEQ ID NO: 2874
  Probe

SEQ ID NO: 44721 - DNA, 40 bp, Artificial Sequence; identical to SEQ ID NO: 15837
  Probe

SEQ ID NO: 44722 - DNA, 47 bp, Artificial Sequence; identical to SEQ ID NO: 2875
  Probe

SEQ ID NO: 44723 - DNA, 48 bp, Artificial Sequence; identical to SEQ ID NO: 15839
  Probe

SEQ ID NO: 44724 - DNA, 39 bp, Artificial Sequence; identical to SEQ ID NO: 2877
  Probe

SEQ ID NO: 44725 - DNA, 50 bp, Artificial Sequence; identical to SEQ ID NO: 37937
  Probe

SEQ ID NO: 44726 - DNA, 35 bp, Artificial Sequence; identical to SEQ ID NO: 15850
  Probe

SEQ ID NO: 44727 - DNA, 36 bp, Artificial Sequence; identical to SEQ ID NO: 2880
  Probe

SEQ ID NO: 44728 - DNA, 39 bp, Artificial Sequence; identical to SEQ ID NO: 2881
  Probe

SEQ ID NO: 44729 - DNA, 39 bp, Artificial Sequence; identical to SEQ ID NO: 2882
  Probe

SEQ ID NO: 44730 - DNA, 38 bp, Artificial Sequence; identical to SEQ ID NO: 15858
  Probe

SEQ ID NO: 44731 - DNA, 39 bp, Artificial Sequence; identical to SEQ ID NO: 2883
  Probe

SEQ ID NO: 44732 - DNA, 27 bp, Artificial Sequence
  Probe
acgcgtgggttcgaatcccaccctcgt

SEQ ID NO: 44733 - DNA, 22 bp, Artificial Sequence
  Probe
acgcgtgggttcgaatcccatc

SEQ ID NO: 44734 - DNA, 28 bp, Artificial Sequence
  Probe
acgcgtgggttcgaatcccatcctcgtc

SEQ ID NO: 44735 - DNA, 29 bp, Artificial Sequence
  Probe
acgcgtgggttcgaatcccatcctcgtcg

SEQ ID NO: 44736 - DNA, 30 bp, Artificial Sequence
  Probe
acgcgtgggttcgaatcccatcctcgtcgc

SEQ ID NO: 44737 - DNA, 27 bp, Artificial Sequence
  Probe
acggagaattttggattctcagggatg

SEQ ID NO: 44738 - DNA, 16 bp, Artificial Sequence
  Probe
acgggctcacatcacc

SEQ ID NO: 44739 - DNA, 17 bp, Artificial Sequence
  Probe
acgggctcacatcaccc

SEQ ID NO: 44740 - DNA, 18 bp, Artificial Sequence
  Probe
acgggctcacatcacccc

SEQ ID NO: 44741 - DNA, 21 bp, Artificial Sequence
  Probe
acgggctcacatcaccccata

SEQ ID NO: 44742 - DNA, 22 bp, Artificial Sequence
  Probe
acgggctcacatcaccccataa

SEQ ID NO: 44743 - DNA, 27 bp, Artificial Sequence
  Probe
acgggctcacatcaccccataaacaaa

SEQ ID NO: 44744 - DNA, 28 bp, Artificial Sequence
  Probe
acgggctcacatcaccccataaacaaat

SEQ ID NO: 44745 - DNA, 17 bp, Artificial Sequence
  Probe
acggggcacaataattt

SEQ ID NO: 44746 - DNA, 50 bp, Artificial Sequence; identical to SEQ ID NO: 37963
  Probe

SEQ ID NO: 44747 - DNA, 16 bp, Artificial Sequence
  Probe
actaaaaaatcccttt

SEQ ID NO: 44748 - DNA, 17 bp, Artificial Sequence
  Probe
actaaaaaatccctttt

SEQ ID NO: 44749 - DNA, 20 bp, Artificial Sequence
  Probe
actaaatactaccgtatggc

SEQ ID NO: 44750 - DNA, 18 bp, Artificial Sequence
  Probe
actaagtgtttgtgggtt

SEQ ID NO: 44751 - DNA, 19 bp, Artificial Sequence
  Probe
actaagtgtttgtgggttt

SEQ ID NO: 44752 - DNA, 21 bp, Artificial Sequence
  Probe
actaagtgtttgtgggtttaa

SEQ ID NO: 44753 - DNA, 37 bp, Artificial Sequence; identical to SEQ ID NO: 2895
  Probe

SEQ ID NO: 44754 - DNA, 38 bp, Artificial Sequence; identical to SEQ ID NO: 2896
  Probe

SEQ ID NO: 44755 - DNA, 39 bp, Artificial Sequence; identical to SEQ ID NO: 2897
  Probe

SEQ ID NO: 44756 - DNA, 40 bp, Artificial Sequence; identical to SEQ ID NO: 2898
  Probe

SEQ ID NO: 44757 - DNA, 41 bp, Artificial Sequence; identical to SEQ ID NO: 2899
  Probe

SEQ ID NO: 44758 - DNA, 42 bp, Artificial Sequence; identical to SEQ ID NO: 2900
  Probe

SEQ ID NO: 44759 - DNA, 44 bp, Artificial Sequence
  Probe
actaagtgtttgtgggtttaagtcccattggtctagtaagggct

SEQ ID NO: 44760 - DNA, 18 bp, Artificial Sequence
  Probe
actactataaccacccta

SEQ ID NO: 44761 - DNA, 16 bp, Artificial Sequence
  Probe
actagttttgacaaca

SEQ ID NO: 44762 - DNA, 27 bp, Artificial Sequence
  Probe
actagttttgacaacattcaaaaaaga

SEQ ID NO: 44763 - DNA, 28 bp, Artificial Sequence
  Probe
actagttttgacaacattcaaaaaagag

SEQ ID NO: 44764 - DNA, 17 bp, Artificial Sequence
  Probe
actcatgcccccatgtc

SEQ ID NO: 44765 - DNA, 18 bp, Artificial Sequence
  Probe
actcatgcccccatgtct

SEQ ID NO: 44766 - DNA, 19 bp, Artificial Sequence
  Probe
actcatgcccccatgtcta

SEQ ID NO: 44767 - DNA, 22 bp, Artificial Sequence
  Probe
actcatgcccccatgtctaaca

SEQ ID NO: 44768 - DNA, 30 bp, Artificial Sequence; identical to SEQ ID NO: 2906
  Probe

SEQ ID NO: 44769 - DNA, 31 bp, Artificial Sequence; identical to SEQ ID NO: 2907
  Probe

SEQ ID NO: 44770 - DNA, 32 bp, Artificial Sequence; identical to SEQ ID NO: 2908
  Probe

SEQ ID NO: 44771 - DNA, 33 bp, Artificial Sequence; identical to SEQ ID NO: 2909
  Probe

SEQ ID NO: 44772 - DNA, 34 bp, Artificial Sequence; identical to SEQ ID NO: 2910
  Probe

SEQ ID NO: 44773 - DNA, 35 bp, Artificial Sequence; identical to SEQ ID NO: 2911
  Probe

SEQ ID NO: 44774 - DNA, 36 bp, Artificial Sequence; identical to SEQ ID NO: 2912
  Probe

SEQ ID NO: 44775 - DNA, 37 bp, Artificial Sequence; identical to SEQ ID NO: 2913
  Probe

SEQ ID NO: 44776 - DNA, 38 bp, Artificial Sequence; identical to SEQ ID NO: 2914
  Probe

SEQ ID NO: 44777 - DNA, 39 bp, Artificial Sequence; identical to SEQ ID NO: 2915
  Probe

SEQ ID NO: 44778 - DNA, 30 bp, Artificial Sequence; identical to SEQ ID NO: 15936
  Probe

SEQ ID NO: 44779 - DNA, 32 bp, Artificial Sequence
  Probe
actcattaaattatgataatcatatttaccaa

SEQ ID NO: 44780 - DNA, 33 bp, Artificial Sequence; identical to SEQ ID NO: 2916
  Probe

SEQ ID NO: 44781 - DNA, 35 bp, Artificial Sequence; identical to SEQ ID NO: 2917
  Probe

SEQ ID NO: 44782 - DNA, 16 bp, Artificial Sequence
  Probe
actcccggtgtgggaa

SEQ ID NO: 44783 - DNA, 18 bp, Artificial Sequence
  Probe
actcccggtgtgggaacg

SEQ ID NO: 44784 - DNA, 19 bp, Artificial Sequence
  Probe
actcccggtgtgggaacgc

SEQ ID NO: 44785 - DNA, 21 bp, Artificial Sequence
  Probe
actctgaatccagcgatccga

SEQ ID NO: 44786 - DNA, 42 bp, Artificial Sequence
  Probe
actctgaatccagcgatccgagttcaaatctcggtggaacct

SEQ ID NO: 44787 - DNA, 45 bp, Artificial Sequence; identical to SEQ ID NO: 38014
  Probe

SEQ ID NO: 44788 - DNA, 50 bp, Artificial Sequence
  Probe
actctgaatccagcgatccgagttcaaatctcggtggaaccttgaagctt

SEQ ID NO: 44789 - DNA, 50 bp, Artificial Sequence; identical to SEQ ID NO: 2921
  Probe

SEQ ID NO: 44790 - DNA, 32 bp, Artificial Sequence; identical to SEQ ID NO: 195
  Probe

SEQ ID NO: 44791 - DNA, 33 bp, Artificial Sequence; identical to SEQ ID NO: 196
  Probe

SEQ ID NO: 44792 - DNA, 34 bp, Artificial Sequence; identical to SEQ ID NO: 197
  Probe

SEQ ID NO: 44793 - DNA, 42 bp, Artificial Sequence; identical to SEQ ID NO: 2937
  Probe

SEQ ID NO: 44794 - DNA, 43 bp, Artificial Sequence; identical to SEQ ID NO: 2938
  Probe

SEQ ID NO: 44795 - DNA, 44 bp, Artificial Sequence; identical to SEQ ID NO: 2939
  Probe

SEQ ID NO: 44796 - DNA, 45 bp, Artificial Sequence; identical to SEQ ID NO: 2940
  Probe

SEQ ID NO: 44797 - DNA, 50 bp, Artificial Sequence; identical to SEQ ID NO: 2941
  Probe

SEQ ID NO: 44798 - DNA, 25 bp, Artificial Sequence
  Probe
actgctaactcatgcccccatgtct

SEQ ID NO: 44799 - DNA, 29 bp, Artificial Sequence
  Probe
actgctaactcatgcccccatgtctaaca

SEQ ID NO: 44800 - DNA, 41 bp, Artificial Sequence; identical to SEQ ID NO: 2951
  Probe

SEQ ID NO: 44801 - DNA, 42 bp, Artificial Sequence; identical to SEQ ID NO: 2952
  Probe

SEQ ID NO: 44802 - DNA, 43 bp, Artificial Sequence; identical to SEQ ID NO: 2953
  Probe

SEQ ID NO: 44803 - DNA, 45 bp, Artificial Sequence; identical to SEQ ID NO: 2955
  Probe

SEQ ID NO: 44804 - DNA, 46 bp, Artificial Sequence; identical to SEQ ID NO: 2956
  Probe

SEQ ID NO: 44805 - DNA, 25 bp, Artificial Sequence
  Probe
actggaaagtgcacttggacgaacc

SEQ ID NO: 44806 - DNA, 26 bp, Artificial Sequence
  Probe
actggaaagtgcacttggacgaacca

SEQ ID NO: 44807 - DNA, 43 bp, Artificial Sequence; identical to SEQ ID NO: 2960
  Probe

SEQ ID NO: 44808 - DNA, 37 bp, Artificial Sequence; identical to SEQ ID NO: 200
  Probe

SEQ ID NO: 44809 - DNA, 38 bp, Artificial Sequence; identical to SEQ ID NO: 2962
  Probe

SEQ ID NO: 44810 - DNA, 39 bp, Artificial Sequence; identical to SEQ ID NO: 2963
  Probe

SEQ ID NO: 44811 - DNA, 40 bp, Artificial Sequence; identical to SEQ ID NO: 2964
  Probe

SEQ ID NO: 44812 - DNA, 41 bp, Artificial Sequence; identical to SEQ ID NO: 2965
  Probe

SEQ ID NO: 44813 - DNA, 42 bp, Artificial Sequence; identical to SEQ ID NO: 2966
  Probe

SEQ ID NO: 44814 - DNA, 43 bp, Artificial Sequence; identical to SEQ ID NO: 2967
  Probe

SEQ ID NO: 44815 - DNA, 45 bp, Artificial Sequence; identical to SEQ ID NO: 2969
  Probe

SEQ ID NO: 44816 - DNA, 46 bp, Artificial Sequence; identical to SEQ ID NO: 2970
  Probe

SEQ ID NO: 44817 - DNA, 16 bp, Artificial Sequence
  Probe
acttaacttgaccgct

SEQ ID NO: 44818 - DNA, 18 bp, Artificial Sequence
  Probe
acttaacttgaccgctct

SEQ ID NO: 44819 - DNA, 20 bp, Artificial Sequence
  Probe
acttaacttgaccgctctga

SEQ ID NO: 44820 - DNA, 21 bp, Artificial Sequence
  Probe
acttaacttgaccgctctgag

SEQ ID NO: 44821 - DNA, 22 bp, Artificial Sequence
  Probe
acttaacttgaccgctctgagc

SEQ ID NO: 44822 - DNA, 23 bp, Artificial Sequence
  Probe
acttaacttgaccgctctgagct

SEQ ID NO: 44823 - DNA, 16 bp, Artificial Sequence
  Probe
acttacacttaggaga

SEQ ID NO: 44824 - DNA, 17 bp, Artificial Sequence
  Probe
acttacacttaggagat

SEQ ID NO: 44825 - DNA, 18 bp, Artificial Sequence
  Probe
acttacacttaggagatt

SEQ ID NO: 44826 - DNA, 21 bp, Artificial Sequence
  Probe
acttacacttaggagatttca

SEQ ID NO: 44827 - DNA, 25 bp, Artificial Sequence
  Probe
acttacacttaggagatttcaactt

SEQ ID NO: 44828 - DNA, 29 bp, Artificial Sequence
  Probe
acttacacttaggagatttcaacttaact

SEQ ID NO: 44829 - DNA, 30 bp, Artificial Sequence; identical to SEQ ID NO: 27455
  Probe

SEQ ID NO: 44830 - DNA, 31 bp, Artificial Sequence; identical to SEQ ID NO: 15998
  Probe

SEQ ID NO: 44831 - DNA, 33 bp, Artificial Sequence; identical to SEQ ID NO: 2981
  Probe

SEQ ID NO: 44832 - DNA, 34 bp, Artificial Sequence; identical to SEQ ID NO: 16000
  Probe

SEQ ID NO: 44833 - DNA, 35 bp, Artificial Sequence; identical to SEQ ID NO: 2982
  Probe

SEQ ID NO: 44834 - DNA, 36 bp, Artificial Sequence; identical to SEQ ID NO: 2983
  Probe

SEQ ID NO: 44835 - DNA, 37 bp, Artificial Sequence; identical to SEQ ID NO: 2984
  Probe

SEQ ID NO: 44836 - DNA, 38 bp, Artificial Sequence; identical to SEQ ID NO: 16004
  Probe

SEQ ID NO: 44837 - DNA, 39 bp, Artificial Sequence; identical to SEQ ID NO: 2985
  Probe

SEQ ID NO: 44838 - DNA, 40 bp, Artificial Sequence; identical to SEQ ID NO: 2986
  Probe

SEQ ID NO: 44839 - DNA, 41 bp, Artificial Sequence; identical to SEQ ID NO: 2987
  Probe

SEQ ID NO: 44840 - DNA, 42 bp, Artificial Sequence; identical to SEQ ID NO: 2988
  Probe

SEQ ID NO: 44841 - DNA, 43 bp, Artificial Sequence; identical to SEQ ID NO: 2989
  Probe

SEQ ID NO: 44842 - DNA, 44 bp, Artificial Sequence; identical to SEQ ID NO: 2990
  Probe

SEQ ID NO: 44843 - DNA, 45 bp, Artificial Sequence; identical to SEQ ID NO: 2991
  Probe

SEQ ID NO: 44844 - DNA, 50 bp, Artificial Sequence; identical to SEQ ID NO: 2992
  Probe

SEQ ID NO: 44845 - DNA, 31 bp, Artificial Sequence
  Probe
acttagcattaaccttttaagttaaagatta

SEQ ID NO: 44846 - DNA, 40 bp, Artificial Sequence; identical to SEQ ID NO: 12626
  Probe

SEQ ID NO: 44847 - DNA, 23 bp, Artificial Sequence
  Probe
acttaggagatttcaacttaact

SEQ ID NO: 44848 - DNA, 27 bp, Artificial Sequence
  Probe
acttaggagatttcaacttaacttgac

SEQ ID NO: 44849 - DNA, 28 bp, Artificial Sequence
  Probe
acttaggagatttcaacttaacttgacc

SEQ ID NO: 44850 - DNA, 29 bp, Artificial Sequence
  Probe
acttaggagatttcaacttaacttgaccg

SEQ ID NO: 44851 - DNA, 30 bp, Artificial Sequence; identical to SEQ ID NO: 9072
  Probe

SEQ ID NO: 44852 - DNA, 31 bp, Artificial Sequence; identical to SEQ ID NO: 2999
  Probe

SEQ ID NO: 44853 - DNA, 33 bp, Artificial Sequence; identical to SEQ ID NO: 3001
  Probe

SEQ ID NO: 44854 - DNA, 34 bp, Artificial Sequence
  Probe
acttaggagatttcaacttaacttgaccgctctg

SEQ ID NO: 44855 - DNA, 35 bp, Artificial Sequence; identical to SEQ ID NO: 3002
  Probe

SEQ ID NO: 44856 - DNA, 36 bp, Artificial Sequence; identical to SEQ ID NO: 3003
  Probe

SEQ ID NO: 44857 - DNA, 37 bp, Artificial Sequence; identical to SEQ ID NO: 3004
  Probe

SEQ ID NO: 44858 - DNA, 38 bp, Artificial Sequence; identical to SEQ ID NO: 3005
  Probe

SEQ ID NO: 44859 - DNA, 24 bp, Artificial Sequence
  Probe
acttccaattaactagttttgaca

SEQ ID NO: 44860 - DNA, 27 bp, Artificial Sequence
  Probe
acttccaattaactagttttgacaaca

SEQ ID NO: 44861 - DNA, 42 bp, Artificial Sequence
  Probe
acttccaattaactagttttgacaacattcaaaaaagagtaa

SEQ ID NO: 44862 - DNA, 43 bp, Artificial Sequence; identical to SEQ ID NO: 3009
  Probe

SEQ ID NO: 44863 - DNA, 44 bp, Artificial Sequence; identical to SEQ ID NO: 3010
  Probe

SEQ ID NO: 44864 - DNA, 50 bp, Artificial Sequence
  Probe
acttccaattaactagttttgacaacattcaaaaaagagtaataaacttc

SEQ ID NO: 44865 - DNA, 19 bp, Artificial Sequence
  Probe
actttacagtcagaggttc

SEQ ID NO: 44866 - DNA, 30 bp, Artificial Sequence; identical to SEQ ID NO: 202
  Probe

SEQ ID NO: 44867 - DNA, 31 bp, Artificial Sequence; identical to SEQ ID NO: 3013
  Probe

SEQ ID NO: 44868 - DNA, 32 bp, Artificial Sequence; identical to SEQ ID NO: 3014
  Probe

SEQ ID NO: 44869 - DNA, 33 bp, Artificial Sequence; identical to SEQ ID NO: 3015
  Probe

SEQ ID NO: 44870 - DNA, 34 bp, Artificial Sequence
  Probe
actttacagtcagaggttcaattcctcttcttaa

SEQ ID NO: 44871 - DNA, 35 bp, Artificial Sequence; identical to SEQ ID NO: 3016
  Probe

SEQ ID NO: 44872 - DNA, 36 bp, Artificial Sequence; identical to SEQ ID NO: 16031
  Probe

SEQ ID NO: 44873 - DNA, 38 bp, Artificial Sequence; identical to SEQ ID NO: 3018
  Probe

SEQ ID NO: 44874 - DNA, 39 bp, Artificial Sequence; identical to SEQ ID NO: 3019
  Probe

SEQ ID NO: 44875 - DNA, 45 bp, Artificial Sequence; identical to SEQ ID NO: 38095
  Probe

SEQ ID NO: 44876 - DNA, 33 bp, Artificial Sequence; identical to SEQ ID NO: 3022
  Probe

SEQ ID NO: 44877 - DNA, 34 bp, Artificial Sequence; identical to SEQ ID NO: 3023
  Probe

SEQ ID NO: 44878 - DNA, 40 bp, Artificial Sequence; identical to SEQ ID NO: 3026
  Probe

SEQ ID NO: 44879 - DNA, 41 bp, Artificial Sequence; identical to SEQ ID NO: 3027
  Probe

SEQ ID NO: 44880 - DNA, 42 bp, Artificial Sequence; identical to SEQ ID NO: 3028
  Probe

SEQ ID NO: 44881 - DNA, 43 bp, Artificial Sequence; identical to SEQ ID NO: 3029
  Probe

SEQ ID NO: 44882 - DNA, 44 bp, Artificial Sequence; identical to SEQ ID NO: 3030
  Probe

SEQ ID NO: 44883 - DNA, 45 bp, Artificial Sequence; identical to SEQ ID NO: 206
  Probe

SEQ ID NO: 44884 - DNA, 46 bp, Artificial Sequence; identical to SEQ ID NO: 3031
  Probe

SEQ ID NO: 44885 - DNA, 47 bp, Artificial Sequence
  Probe
actttgatagagtaaataataggagcttaaacccccttatttctagg

SEQ ID NO: 44886 - DNA, 48 bp, Artificial Sequence
  Probe
actttgatagagtaaataataggagcttaaacccccttatttctagga

SEQ ID NO: 44887 - DNA, 49 bp, Artificial Sequence; identical to SEQ ID NO: 3032
  Probe

SEQ ID NO: 44888 - DNA, 50 bp, Artificial Sequence; identical to SEQ ID NO: 3033
  Probe

SEQ ID NO: 44889 - DNA, 28 bp, Artificial Sequence
  Probe
acttttaaaggataacagctatccattg

SEQ ID NO: 44890 - DNA, 33 bp, Artificial Sequence; identical to SEQ ID NO: 3035
  Probe

SEQ ID NO: 44891 - DNA, 34 bp, Artificial Sequence; identical to SEQ ID NO: 212
  Probe

SEQ ID NO: 44892 - DNA, 40 bp, Artificial Sequence; identical to SEQ ID NO: 16056
  Probe

SEQ ID NO: 44893 - DNA, 43 bp, Artificial Sequence; identical to SEQ ID NO: 3038
  Probe

SEQ ID NO: 44894 - DNA, 44 bp, Artificial Sequence; identical to SEQ ID NO: 16059
  Probe

SEQ ID NO: 44895 - DNA, 45 bp, Artificial Sequence
  Probe
acttttaaaggataacagctatccattggtcttaggccccaaaaa

SEQ ID NO: 44896 - DNA, 50 bp, Artificial Sequence; identical to SEQ ID NO: 3039
  Probe

SEQ ID NO: 44897 - DNA, 29 bp, Artificial Sequence
  Probe
agaaagctcacaagaactgctaactcatg

SEQ ID NO: 44898 - DNA, 50 bp, Artificial Sequence; identical to SEQ ID NO: 216
  Probe

SEQ ID NO: 44899 - DNA, 16 bp, Artificial Sequence
  Probe
agaaaggccgaatttt

SEQ ID NO: 44900 - DNA, 17 bp, Artificial Sequence
  Probe
agaaaggccgaatttta

SEQ ID NO: 44901 - DNA, 50 bp, Artificial Sequence; identical to SEQ ID NO: 217
  Probe

SEQ ID NO: 44902 - DNA, 16 bp, Artificial Sequence
  Probe
agaacagggtttgtta

SEQ ID NO: 44903 - DNA, 39 bp, Artificial Sequence; identical to SEQ ID NO: 3054
  Probe

SEQ ID NO: 44904 - DNA, 24 bp, Artificial Sequence
  Probe
agaaccaacacctctttacagtga

SEQ ID NO: 44905 - DNA, 25 bp, Artificial Sequence
  Probe
agaaccaacacctctttacagtgaa

SEQ ID NO: 44906 - DNA, 26 bp, Artificial Sequence
  Probe
agaaccaacacctctttacagtgaaa

SEQ ID NO: 44907 - DNA, 27 bp, Artificial Sequence
  Probe
agaaccaacacctctttacagtgaaat

SEQ ID NO: 44908 - DNA, 17 bp, Artificial Sequence
  Probe
agaactgctaactcatg

SEQ ID NO: 44909 - DNA, 23 bp, Artificial Sequence
  Probe
agaactgctaactcatgccccca

SEQ ID NO: 44910 - DNA, 31 bp, Artificial Sequence; identical to SEQ ID NO: 16095
  Probe

SEQ ID NO: 44911 - DNA, 35 bp, Artificial Sequence; identical to SEQ ID NO: 12635
  Probe

SEQ ID NO: 44912 - DNA, 43 bp, Artificial Sequence; identical to SEQ ID NO: 221
  Probe

SEQ ID NO: 44913 - DNA, 49 bp, Artificial Sequence; identical to SEQ ID NO: 3069
  Probe

SEQ ID NO: 44914 - DNA, 50 bp, Artificial Sequence; identical to SEQ ID NO: 3070
  Probe

SEQ ID NO: 44915 - DNA, 31 bp, Artificial Sequence; identical to SEQ ID NO: 225
  Probe

SEQ ID NO: 44916 - DNA, 31 bp, Artificial Sequence; identical to SEQ ID NO: 226
  Probe

SEQ ID NO: 44917 - DNA, 31 bp, Artificial Sequence; identical to SEQ ID NO: 230
  Probe

SEQ ID NO: 44918 - DNA, 33 bp, Artificial Sequence; identical to SEQ ID NO: 231
  Probe

SEQ ID NO: 44919 - DNA, 36 bp, Artificial Sequence; identical to SEQ ID NO: 3082
  Probe

SEQ ID NO: 44920 - DNA, 31 bp, Artificial Sequence; identical to SEQ ID NO: 3084
  Probe

SEQ ID NO: 44921 - DNA, 36 bp, Artificial Sequence; identical to SEQ ID NO: 3087
  Probe

SEQ ID NO: 44922 - DNA, 17 bp, Artificial Sequence
  Probe
agaagcagcttcaaacc

SEQ ID NO: 44923 - DNA, 25 bp, Artificial Sequence
  Probe
agaagcagcttcaaacctgccgggg

SEQ ID NO: 44924 - DNA, 26 bp, Artificial Sequence
  Probe
agaagcagcttcaaacctgccggggc

SEQ ID NO: 44925 - DNA, 28 bp, Artificial Sequence
  Probe
agaagcagcttcaaacctgccggggctt

SEQ ID NO: 44926 - DNA, 29 bp, Artificial Sequence
  Probe
agaagcagcttcaaacctgccggggcttc

SEQ ID NO: 44927 - DNA, 30 bp, Artificial Sequence; identical to SEQ ID NO: 3090
  Probe

SEQ ID NO: 44928 - DNA, 31 bp, Artificial Sequence; identical to SEQ ID NO: 3091
  Probe

SEQ ID NO: 44929 - DNA, 31 bp, Artificial Sequence; identical to SEQ ID NO: 12641
  Probe

SEQ ID NO: 44930 - DNA, 34 bp, Artificial Sequence; identical to SEQ ID NO: 232
  Probe

SEQ ID NO: 44931 - DNA, 35 bp, Artificial Sequence; identical to SEQ ID NO: 3095
  Probe

SEQ ID NO: 44932 - DNA, 36 bp, Artificial Sequence; identical to SEQ ID NO: 3096
  Probe

SEQ ID NO: 44933 - DNA, 28 bp, Artificial Sequence
  Probe
agaatcttagctttgggtgctaatggtg

SEQ ID NO: 44934 - DNA, 29 bp, Artificial Sequence
  Probe
agaatcttagctttgggtgctaatggtgg

SEQ ID NO: 44935 - DNA, 30 bp, Artificial Sequence; identical to SEQ ID NO: 16125
  Probe

SEQ ID NO: 44936 - DNA, 48 bp, Artificial Sequence; identical to SEQ ID NO: 3099
  Probe

SEQ ID NO: 44937 - DNA, 49 bp, Artificial Sequence; identical to SEQ ID NO: 234
  Probe

SEQ ID NO: 44938 - DNA, 50 bp, Artificial Sequence
  Probe
agaattctcgcctgccacgcgggaggcccgggttcgattcccggccaatg

SEQ ID NO: 44939 - DNA, 30 bp, Artificial Sequence; identical to SEQ ID NO: 16156
  Probe

SEQ ID NO: 44940 - DNA, 28 bp, Artificial Sequence
  Probe
agaccaagagccttcaaagccctcagta

SEQ ID NO: 44941 - DNA, 35 bp, Artificial Sequence; identical to SEQ ID NO: 237
  Probe

SEQ ID NO: 44942 - DNA, 49 bp, Artificial Sequence; identical to SEQ ID NO: 3109
  Probe

SEQ ID NO: 44943 - DNA, 29 bp, Artificial Sequence
  Probe
agacccgaggtagggctttggctgtgggg

SEQ ID NO: 44944 - DNA, 22 bp, Artificial Sequence
  Probe
agaccggggttcaattccccga

SEQ ID NO: 44945 - DNA, 24 bp, Artificial Sequence
  Probe
agaccggggttcaattccccgacg

SEQ ID NO: 44946 - DNA, 27 bp, Artificial Sequence
  Probe
agaccggggttcaattccccgacgggg

SEQ ID NO: 44947 - DNA, 30 bp, Artificial Sequence; identical to SEQ ID NO: 3111
  Probe

SEQ ID NO: 44948 - DNA, 32 bp, Artificial Sequence; identical to SEQ ID NO: 3112
  Probe

SEQ ID NO: 44949 - DNA, 22 bp, Artificial Sequence
  Probe
agaccggggttcgattccccga

SEQ ID NO: 44950 - DNA, 26 bp, Artificial Sequence
  Probe
agaccggggttcgattccccgacggg

SEQ ID NO: 44951 - DNA, 30 bp, Artificial Sequence; identical to SEQ ID NO: 3114
  Probe

SEQ ID NO: 44952 - DNA, 32 bp, Artificial Sequence; identical to SEQ ID NO: 3116
  Probe

SEQ ID NO: 44953 - DNA, 31 bp, Artificial Sequence; identical to SEQ ID NO: 3117
  Probe

SEQ ID NO: 44954 - DNA, 32 bp, Artificial Sequence; identical to SEQ ID NO: 3118
  Probe

SEQ ID NO: 44955 - DNA, 32 bp, Artificial Sequence; identical to SEQ ID NO: 3119
  Probe

SEQ ID NO: 44956 - DNA, 30 bp, Artificial Sequence; identical to SEQ ID NO: 3120
  Probe

SEQ ID NO: 44957 - DNA, 31 bp, Artificial Sequence; identical to SEQ ID NO: 3121
  Probe

SEQ ID NO: 44958 - DNA, 32 bp, Artificial Sequence; identical to SEQ ID NO: 3122
  Probe

SEQ ID NO: 44959 - DNA, 32 bp, Artificial Sequence; identical to SEQ ID NO: 3123
  Probe

SEQ ID NO: 44960 - DNA, 18 bp, Artificial Sequence
  Probe
agacgggctcacatcacc

SEQ ID NO: 44961 - DNA, 20 bp, Artificial Sequence
  Probe
agacgggctcacatcacccc

SEQ ID NO: 44962 - DNA, 21 bp, Artificial Sequence
  Probe
agacgggctcacatcacccca

SEQ ID NO: 44963 - DNA, 22 bp, Artificial Sequence
  Probe
agacgggctcacatcaccccat

SEQ ID NO: 44964 - DNA, 23 bp, Artificial Sequence
  Probe
agacgggctcacatcaccccata

SEQ ID NO: 44965 - DNA, 24 bp, Artificial Sequence
  Probe
agacgggctcacatcaccccataa

SEQ ID NO: 44966 - DNA, 25 bp, Artificial Sequence
  Probe
agacgggctcacatcaccccataaa

SEQ ID NO: 44967 - DNA, 27 bp, Artificial Sequence
  Probe
agacgggctcacatcaccccataaaca

SEQ ID NO: 44968 - DNA, 29 bp, Artificial Sequence
  Probe
agacgggctcacatcaccccataaacaaa

SEQ ID NO: 44969 - DNA, 30 bp, Artificial Sequence; identical to SEQ ID NO: 3135
  Probe

SEQ ID NO: 44970 - DNA, 28 bp, Artificial Sequence
  Probe
agagaaccaacacctctttacagtgaaa

SEQ ID NO: 44971 - DNA, 29 bp, Artificial Sequence
  Probe
agagaaccaacacctctttacagtgaaat

SEQ ID NO: 44972 - DNA, 50 bp, Artificial Sequence
  Probe
agagcatcagacttttaatctgagggtccagggttcaagtccctgttcgg

SEQ ID NO: 44973 - DNA, 25 bp, Artificial Sequence
  Probe
agagcatgagactcttaatctcagg

SEQ ID NO: 44974 - DNA, 26 bp, Artificial Sequence
  Probe
agagcatgagactcttaatctcaggg

SEQ ID NO: 44975 - DNA, 25 bp, Artificial Sequence
  Probe
agagcatgggactcttaatcccagg

SEQ ID NO: 44976 - DNA, 26 bp, Artificial Sequence
  Probe
agagcatgggactcttaatcccaggg

SEQ ID NO: 44977 - DNA, 29 bp, Artificial Sequence
  Probe
agagcatgggactcttaatcccagggtcg

SEQ ID NO: 44978 - DNA, 32 bp, Artificial Sequence
  Probe
agagcatgggactcttaatcccagggtcgtgg

SEQ ID NO: 44979 - DNA, 16 bp, Artificial Sequence
  Probe
agagcatttgactgca

SEQ ID NO: 44980 - DNA, 20 bp, Artificial Sequence
  Probe
agagcccggtaatcgcataa

SEQ ID NO: 44981 - DNA, 26 bp, Artificial Sequence
  Probe
agagcccggtaatcgcataaaactta

SEQ ID NO: 44982 - DNA, 31 bp, Artificial Sequence; identical to SEQ ID NO: 248
  Probe

SEQ ID NO: 44983 - DNA, 32 bp, Artificial Sequence; identical to SEQ ID NO: 3144
  Probe

SEQ ID NO: 44984 - DNA, 36 bp, Artificial Sequence
  Probe
agagcccggtaatcgcataaaacttaaaactttaca

SEQ ID NO: 44985 - DNA, 39 bp, Artificial Sequence
  Probe
agagcccggtaatcgcataaaacttaaaactttacagtc

SEQ ID NO: 44986 - DNA, 50 bp, Artificial Sequence
  Probe
agagcgtggtgctaataacgccaaggtcgcgggttcgatccccgtactgg

SEQ ID NO: 44987 - DNA, 38 bp, Artificial Sequence; identical to SEQ ID NO: 16231
  Probe

SEQ ID NO: 44988 - DNA, 29 bp, Artificial Sequence
  Probe
agaggtcccgggttcaaatcccggacgag

SEQ ID NO: 44989 - DNA, 30 bp, Artificial Sequence; identical to SEQ ID NO: 16238
  Probe

SEQ ID NO: 44990 - DNA, 31 bp, Artificial Sequence; identical to SEQ ID NO: 16239
  Probe

SEQ ID NO: 44991 - DNA, 32 bp, Artificial Sequence; identical to SEQ ID NO: 16240
  Probe

SEQ ID NO: 44992 - DNA, 33 bp, Artificial Sequence; identical to SEQ ID NO: 16241
  Probe

SEQ ID NO: 44993 - DNA, 34 bp, Artificial Sequence; identical to SEQ ID NO: 16242
  Probe

SEQ ID NO: 44994 - DNA, 35 bp, Artificial Sequence; identical to SEQ ID NO: 16243
  Probe

SEQ ID NO: 44995 - DNA, 35 bp, Artificial Sequence
  Probe
agaggtcgatggatcgaaaccatcctctgctaggt

SEQ ID NO: 44996 - DNA, 18 bp, Artificial Sequence
  Probe
agagtaaataataggagc

SEQ ID NO: 44997 - DNA, 25 bp, Artificial Sequence
  Probe
agagtaaataataggagcttaaacc

SEQ ID NO: 44998 - DNA, 32 bp, Artificial Sequence; identical to SEQ ID NO: 253
  Probe

SEQ ID NO: 44999 - DNA, 33 bp, Artificial Sequence; identical to SEQ ID NO: 3156
  Probe

SEQ ID NO: 45000 - DNA, 34 bp, Artificial Sequence; identical to SEQ ID NO: 16253
  Probe

SEQ ID NO: 45001 - DNA, 35 bp, Artificial Sequence; identical to SEQ ID NO: 254
  Probe

SEQ ID NO: 45002 - DNA, 38 bp, Artificial Sequence; identical to SEQ ID NO: 3157
  Probe

SEQ ID NO: 45003 - DNA, 39 bp, Artificial Sequence; identical to SEQ ID NO: 3158
  Probe

SEQ ID NO: 45004 - DNA, 40 bp, Artificial Sequence; identical to SEQ ID NO: 3159
  Probe

SEQ ID NO: 45005 - DNA, 46 bp, Artificial Sequence
  Probe
agagtaaataataggagcttaaacccccttatttctaggactatga

SEQ ID NO: 45006 - DNA, 26 bp, Artificial Sequence
  Probe
agagtggggttttgcagtccttagct

SEQ ID NO: 45007 - DNA, 30 bp, Artificial Sequence
  Probe
agatcctgggttcgaatcccagcggggcct

SEQ ID NO: 45008 - DNA, 31 bp, Artificial Sequence
  Probe
agatcctgggttcgaatcccagcggggcctg

SEQ ID NO: 45009 - DNA, 31 bp, Artificial Sequence
  Probe
agatcctgggttcgaatcccagcggggcctt

SEQ ID NO: 45010 - DNA, 33 bp, Artificial Sequence
  Probe
agatcctgggttcgaatcccagcggggccttac

SEQ ID NO: 45011 - DNA, 27 bp, Artificial Sequence
  Probe
agatcctgggttcgaatcccagcggtg

SEQ ID NO: 45012 - DNA, 28 bp, Artificial Sequence
  Probe
agatcctgggttcgaatcccagcggtgc

SEQ ID NO: 45013 - DNA, 30 bp, Artificial Sequence
  Probe
agatcctgggttcgaatcccagcggtgcct

SEQ ID NO: 45014 - DNA, 31 bp, Artificial Sequence
  Probe
agatcctgggttcgaatcccagcggtgcctc

SEQ ID NO: 45015 - DNA, 32 bp, Artificial Sequence
  Probe
agatcctgggttcgaatcccagcggtgcctcc

SEQ ID NO: 45016 - DNA, 33 bp, Artificial Sequence; identical to SEQ ID NO: 16273
  Probe

SEQ ID NO: 45017 - DNA, 27 bp, Artificial Sequence
  Probe
agatgaaaacctttttccaaggacaaa

SEQ ID NO: 45018 - DNA, 28 bp, Artificial Sequence
  Probe
agatgaaaacctttttccaaggacaaat

SEQ ID NO: 45019 - DNA, 31 bp, Artificial Sequence; identical to SEQ ID NO: 16280
  Probe

SEQ ID NO: 45020 - DNA, 30 bp, Artificial Sequence; identical to SEQ ID NO: 9098
  Probe

SEQ ID NO: 45021 - DNA, 31 bp, Artificial Sequence; identical to SEQ ID NO: 3175
  Probe

SEQ ID NO: 45022 - DNA, 32 bp, Artificial Sequence; identical to SEQ ID NO: 3176
  Probe

SEQ ID NO: 45023 - DNA, 33 bp, Artificial Sequence; identical to SEQ ID NO: 3177
  Probe

SEQ ID NO: 45024 - DNA, 34 bp, Artificial Sequence; identical to SEQ ID NO: 3178
  Probe

SEQ ID NO: 45025 - DNA, 35 bp, Artificial Sequence; identical to SEQ ID NO: 3179
  Probe

SEQ ID NO: 45026 - DNA, 28 bp, Artificial Sequence
  Probe
agattctaggttcgactcctggctggct

SEQ ID NO: 45027 - DNA, 33 bp, Artificial Sequence; identical to SEQ ID NO: 3184
  Probe

SEQ ID NO: 45028 - DNA, 27 bp, Artificial Sequence
  Probe
agattgagggttcgagtcccttcgtgg

SEQ ID NO: 45029 - DNA, 29 bp, Artificial Sequence
  Probe
agattgagggttcgagtcccttcgtggtc

SEQ ID NO: 45030 - DNA, 30 bp, Artificial Sequence; identical to SEQ ID NO: 9106
  Probe

SEQ ID NO: 45031 - DNA, 28 bp, Artificial Sequence
  Probe
agattgcaggttcgagtcctgccgcggt

SEQ ID NO: 45032 - DNA, 33 bp, Artificial Sequence; identical to SEQ ID NO: 24968
  Probe

SEQ ID NO: 45033 - DNA, 35 bp, Artificial Sequence; identical to SEQ ID NO: 3196
  Probe

SEQ ID NO: 45034 - DNA, 36 bp, Artificial Sequence; identical to SEQ ID NO: 3197
  Probe

SEQ ID NO: 45035 - DNA, 37 bp, Artificial Sequence; identical to SEQ ID NO: 266
  Probe

SEQ ID NO: 45036 - DNA, 45 bp, Artificial Sequence; identical to SEQ ID NO: 27714
  Probe

SEQ ID NO: 45037 - DNA, 46 bp, Artificial Sequence; identical to SEQ ID NO: 3203
  Probe

SEQ ID NO: 45038 - DNA, 49 bp, Artificial Sequence; identical to SEQ ID NO: 3204
  Probe

SEQ ID NO: 45039 - DNA, 50 bp, Artificial Sequence; identical to SEQ ID NO: 3205
  Probe

SEQ ID NO: 45040 - DNA, 21 bp, Artificial Sequence
  Probe
agatttcaacttaacttgacc

SEQ ID NO: 45041 - DNA, 22 bp, Artificial Sequence
  Probe
agatttcaacttaacttgaccg

SEQ ID NO: 45042 - DNA, 23 bp, Artificial Sequence
  Probe
agatttcaacttaacttgaccgc

SEQ ID NO: 45043 - DNA, 24 bp, Artificial Sequence
  Probe
agatttcaacttaacttgaccgct

SEQ ID NO: 45044 - DNA, 25 bp, Artificial Sequence
  Probe
agatttcaacttaacttgaccgctc

SEQ ID NO: 45045 - DNA, 26 bp, Artificial Sequence
  Probe
agatttcaacttaacttgaccgctct

SEQ ID NO: 45046 - DNA, 27 bp, Artificial Sequence
  Probe
agatttcaacttaacttgaccgctctg

SEQ ID NO: 45047 - DNA, 28 bp, Artificial Sequence
  Probe
agatttcaacttaacttgaccgctctga

SEQ ID NO: 45048 - DNA, 29 bp, Artificial Sequence
  Probe
agatttcaacttaacttgaccgctctgag

SEQ ID NO: 45049 - DNA, 30 bp, Artificial Sequence; identical to SEQ ID NO: 3214
  Probe

SEQ ID NO: 45050 - DNA, 31 bp, Artificial Sequence; identical to SEQ ID NO: 3215
  Probe

SEQ ID NO: 45051 - DNA, 29 bp, Artificial Sequence
  Probe
agcaacctcggttcgaatccgagtcacgg

SEQ ID NO: 45052 - DNA, 31 bp, Artificial Sequence; identical to SEQ ID NO: 3216
  Probe

SEQ ID NO: 45053 - DNA, 32 bp, Artificial Sequence
  Probe
agcaacctcggttcgaatccgagtcacggcaa

SEQ ID NO: 45054 - DNA, 33 bp, Artificial Sequence; identical to SEQ ID NO: 3217
  Probe

SEQ ID NO: 45055 - DNA, 32 bp, Artificial Sequence
  Probe
agcaacctcggttcgaatccgagtcacggcag

SEQ ID NO: 45056 - DNA, 33 bp, Artificial Sequence; identical to SEQ ID NO: 3218
  Probe

SEQ ID NO: 45057 - DNA, 34 bp, Artificial Sequence; identical to SEQ ID NO: 3219
  Probe

SEQ ID NO: 45058 - DNA, 32 bp, Artificial Sequence
  Probe
agcaacctcggttcgaatccgagtcacggcat

SEQ ID NO: 45059 - DNA, 33 bp, Artificial Sequence; identical to SEQ ID NO: 3220
  Probe

SEQ ID NO: 45060 - DNA, 34 bp, Artificial Sequence; identical to SEQ ID NO: 3221
  Probe

SEQ ID NO: 45061 - DNA, 50 bp, Artificial Sequence; identical to SEQ ID NO: 3229
  Probe

SEQ ID NO: 45062 - DNA, 17 bp, Artificial Sequence
  Probe
agcacccaacttacact

SEQ ID NO: 45063 - DNA, 18 bp, Artificial Sequence
  Probe
agcacccaacttacactt

SEQ ID NO: 45064 - DNA, 19 bp, Artificial Sequence
  Probe
agcacccaacttacactta

SEQ ID NO: 45065 - DNA, 20 bp, Artificial Sequence
  Probe
agcacccaacttacacttag

SEQ ID NO: 45066 - DNA, 21 bp, Artificial Sequence
  Probe
agcacccaacttacacttagg

SEQ ID NO: 45067 - DNA, 22 bp, Artificial Sequence
  Probe
agcacccaacttacacttagga

SEQ ID NO: 45068 - DNA, 23 bp, Artificial Sequence
  Probe
agcacccaacttacacttaggag

SEQ ID NO: 45069 - DNA, 24 bp, Artificial Sequence
  Probe
agcacccaacttacacttaggaga

SEQ ID NO: 45070 - DNA, 25 bp, Artificial Sequence
  Probe
agcacccaacttacacttaggagat

SEQ ID NO: 45071 - DNA, 26 bp, Artificial Sequence
  Probe
agcacccaacttacacttaggagatt

SEQ ID NO: 45072 - DNA, 27 bp, Artificial Sequence
  Probe
agcacccaacttacacttaggagattt

SEQ ID NO: 45073 - DNA, 28 bp, Artificial Sequence
  Probe
agcacccaacttacacttaggagatttc

SEQ ID NO: 45074 - DNA, 29 bp, Artificial Sequence
  Probe
agcacccaacttacacttaggagatttca

SEQ ID NO: 45075 - DNA, 30 bp, Artificial Sequence; identical to SEQ ID NO: 16336
  Probe

SEQ ID NO: 45076 - DNA, 31 bp, Artificial Sequence; identical to SEQ ID NO: 3241
  Probe

SEQ ID NO: 45077 - DNA, 32 bp, Artificial Sequence; identical to SEQ ID NO: 3242
  Probe

SEQ ID NO: 45078 - DNA, 33 bp, Artificial Sequence; identical to SEQ ID NO: 3243
  Probe

SEQ ID NO: 45079 - DNA, 34 bp, Artificial Sequence; identical to SEQ ID NO: 16340
  Probe

SEQ ID NO: 45080 - DNA, 36 bp, Artificial Sequence; identical to SEQ ID NO: 3244
  Probe

SEQ ID NO: 45081 - DNA, 37 bp, Artificial Sequence; identical to SEQ ID NO: 16343
  Probe

SEQ ID NO: 45082 - DNA, 38 bp, Artificial Sequence; identical to SEQ ID NO: 16344
  Probe

SEQ ID NO: 45083 - DNA, 39 bp, Artificial Sequence; identical to SEQ ID NO: 3245
  Probe

SEQ ID NO: 45084 - DNA, 41 bp, Artificial Sequence; identical to SEQ ID NO: 16345
  Probe

SEQ ID NO: 45085 - DNA, 42 bp, Artificial Sequence; identical to SEQ ID NO: 16346
  Probe

SEQ ID NO: 45086 - DNA, 43 bp, Artificial Sequence; identical to SEQ ID NO: 3246
  Probe

SEQ ID NO: 45087 - DNA, 44 bp, Artificial Sequence; identical to SEQ ID NO: 3247
  Probe

SEQ ID NO: 45088 - DNA, 45 bp, Artificial Sequence; identical to SEQ ID NO: 3248
  Probe

SEQ ID NO: 45089 - DNA, 46 bp, Artificial Sequence; identical to SEQ ID NO: 3249
  Probe

SEQ ID NO: 45090 - DNA, 49 bp, Artificial Sequence; identical to SEQ ID NO: 3250
  Probe

SEQ ID NO: 45091 - DNA, 50 bp, Artificial Sequence; identical to SEQ ID NO: 3251
  Probe

SEQ ID NO: 45092 - DNA, 16 bp, Artificial Sequence
  Probe
agcactctggactctg

SEQ ID NO: 45093 - DNA, 17 bp, Artificial Sequence
  Probe
agcactctggactctga

SEQ ID NO: 45094 - DNA, 24 bp, Artificial Sequence
  Probe
agcactctggactctgaatccagc

SEQ ID NO: 45095 - DNA, 25 bp, Artificial Sequence
  Probe
agcactctggactctgaatccagcg

SEQ ID NO: 45096 - DNA, 28 bp, Artificial Sequence
  Probe
agcactctggactctgaatccagcgatc

SEQ ID NO: 45097 - DNA, 33 bp, Artificial Sequence; identical to SEQ ID NO: 27739
  Probe

SEQ ID NO: 45098 - DNA, 46 bp, Artificial Sequence
  Probe
agcactctggactctgaatccagcgatccgagttcaaatctcggtg

SEQ ID NO: 45099 - DNA, 48 bp, Artificial Sequence
  Probe
agcactctggactctgaatccagcgatccgagttcaaatctcggtgga

SEQ ID NO: 45100 - DNA, 49 bp, Artificial Sequence
  Probe
agcactctggactctgaatccagcgatccgagttcaaatctcggtggaa

SEQ ID NO: 45101 - DNA, 50 bp, Artificial Sequence
  Probe
agcactctggactctgaatccagcgatccgagttcaaatctcggtgggac

SEQ ID NO: 45102 - DNA, 50 bp, Artificial Sequence
  Probe
agcactctggactttgaatccagcaatccgagttcgaatctcggtgggac

SEQ ID NO: 45103 - DNA, 32 bp, Artificial Sequence; identical to SEQ ID NO: 16357
  Probe

SEQ ID NO: 45104 - DNA, 49 bp, Artificial Sequence
  Probe
agcactctggactttgaatccagcgatccgagttcaaatctcggtggga

SEQ ID NO: 45105 - DNA, 18 bp, Artificial Sequence
  Probe
agcagagtggcgcagcgg

SEQ ID NO: 45106 - DNA, 23 bp, Artificial Sequence
  Probe
agcagagtggcgcagcggaagcg

SEQ ID NO: 45107 - DNA, 24 bp, Artificial Sequence
  Probe
agcagagtggcgcagcggaagcgt

SEQ ID NO: 45108 - DNA, 30 bp, Artificial Sequence; identical to SEQ ID NO: 8539
  Probe

SEQ ID NO: 45109 - DNA, 50 bp, Artificial Sequence; identical to SEQ ID NO: 3258
  Probe

SEQ ID NO: 45110 - DNA, 28 bp, Artificial Sequence
  Probe
agcagcttcaaacctgccggggcttctc

SEQ ID NO: 45111 - DNA, 39 bp, Artificial Sequence; identical to SEQ ID NO: 16375
  Probe

SEQ ID NO: 45112 - DNA, 28 bp, Artificial Sequence
  Probe
agcatagctgccttccaagcagttgacc

SEQ ID NO: 45113 - DNA, 30 bp, Artificial Sequence; identical to SEQ ID NO: 3263
  Probe

SEQ ID NO: 45114 - DNA, 31 bp, Artificial Sequence; identical to SEQ ID NO: 12686
  Probe

SEQ ID NO: 45115 - DNA, 50 bp, Artificial Sequence; identical to SEQ ID NO: 3264
  Probe

SEQ ID NO: 45116 - DNA, 50 bp, Artificial Sequence
  Probe
agcatgagactcttaatctcagggtcgtgggttcgagccccacgttgggc

SEQ ID NO: 45117 - DNA, 27 bp, Artificial Sequence
  Probe
agcatgggactcttaatcccagggtcg

SEQ ID NO: 45118 - DNA, 29 bp, Artificial Sequence
  Probe
agcatgggactcttaatcccagggtcgtg

SEQ ID NO: 45119 - DNA, 50 bp, Artificial Sequence
  Probe
agcatgggactcttaatcccagggtcgtgggttcgagccccacgttgggc

SEQ ID NO: 45120 - DNA, 17 bp, Artificial Sequence
  Probe
agcattaaccttttaag

SEQ ID NO: 45121 - DNA, 26 bp, Artificial Sequence
  Probe
agcattaaccttttaagttaaagatt

SEQ ID NO: 45122 - DNA, 27 bp, Artificial Sequence
  Probe
agcattaaccttttaagttaaagatta

SEQ ID NO: 45123 - DNA, 31 bp, Artificial Sequence; identical to SEQ ID NO: 16398
  Probe

SEQ ID NO: 45124 - DNA, 32 bp, Artificial Sequence; identical to SEQ ID NO: 16399
  Probe

SEQ ID NO: 45125 - DNA, 33 bp, Artificial Sequence; identical to SEQ ID NO: 12688
  Probe

SEQ ID NO: 45126 - DNA, 34 bp, Artificial Sequence; identical to SEQ ID NO: 12689
  Probe

SEQ ID NO: 45127 - DNA, 37 bp, Artificial Sequence; identical to SEQ ID NO: 282
  Probe

SEQ ID NO: 45128 - DNA, 39 bp, Artificial Sequence; identical to SEQ ID NO: 283
  Probe

SEQ ID NO: 45129 - DNA, 41 bp, Artificial Sequence; identical to SEQ ID NO: 3275
  Probe

SEQ ID NO: 45130 - DNA, 42 bp, Artificial Sequence; identical to SEQ ID NO: 284
  Probe

SEQ ID NO: 45131 - DNA, 44 bp, Artificial Sequence
  Probe
agcattaaccttttaagttaaagattaagagaaccaacacctct

SEQ ID NO: 45132 - DNA, 50 bp, Artificial Sequence; identical to SEQ ID NO: 3281
  Probe

SEQ ID NO: 45133 - DNA, 32 bp, Artificial Sequence
  Probe
agcattggtggttcagtggtagaattctcgcc

SEQ ID NO: 45134 - DNA, 33 bp, Artificial Sequence; identical to SEQ ID NO: 3282
  Probe

SEQ ID NO: 45135 - DNA, 36 bp, Artificial Sequence; identical to SEQ ID NO: 16409
  Probe

SEQ ID NO: 45136 - DNA, 39 bp, Artificial Sequence; identical to SEQ ID NO: 3284
  Probe

SEQ ID NO: 45137 - DNA, 35 bp, Artificial Sequence
  Probe
agccagggattgtgggttcgagtcccacctggggt

SEQ ID NO: 45138 - DNA, 36 bp, Artificial Sequence; identical to SEQ ID NO: 16411
  Probe

SEQ ID NO: 45139 - DNA, 39 bp, Artificial Sequence; identical to SEQ ID NO: 3285
  Probe

SEQ ID NO: 45140 - DNA, 32 bp, Artificial Sequence
  Probe
agccagggattgtgggttcgagtcccatctgg

SEQ ID NO: 45141 - DNA, 33 bp, Artificial Sequence; identical to SEQ ID NO: 16415
  Probe

SEQ ID NO: 45142 - DNA, 34 bp, Artificial Sequence; identical to SEQ ID NO: 287
  Probe

SEQ ID NO: 45143 - DNA, 37 bp, Artificial Sequence; identical to SEQ ID NO: 16417
  Probe

SEQ ID NO: 45144 - DNA, 38 bp, Artificial Sequence; identical to SEQ ID NO: 16418
  Probe

SEQ ID NO: 45145 - DNA, 39 bp, Artificial Sequence; identical to SEQ ID NO: 3287
  Probe

SEQ ID NO: 45146 - DNA, 50 bp, Artificial Sequence; identical to SEQ ID NO: 3288
  Probe

SEQ ID NO: 45147 - DNA, 16 bp, Artificial Sequence
  Probe
agcccacccagggacg

SEQ ID NO: 45148 - DNA, 17 bp, Artificial Sequence
  Probe
agcccacccagggacgc

SEQ ID NO: 45149 - DNA, 18 bp, Artificial Sequence
  Probe
agcccacccagggacgcc

SEQ ID NO: 45150 - DNA, 17 bp, Artificial Sequence
  Probe
agccccaaacccactcc

SEQ ID NO: 45151 - DNA, 20 bp, Artificial Sequence
  Probe
agccccaaacccactccacc

SEQ ID NO: 45152 - DNA, 21 bp, Artificial Sequence
  Probe
agccccaaacccactccacct

SEQ ID NO: 45153 - DNA, 16 bp, Artificial Sequence
  Probe
agccccagtggaacca

SEQ ID NO: 45154 - DNA, 32 bp, Artificial Sequence; identical to SEQ ID NO: 16426
  Probe

SEQ ID NO: 45155 - DNA, 33 bp, Artificial Sequence; identical to SEQ ID NO: 16427
  Probe

SEQ ID NO: 45156 - DNA, 34 bp, Artificial Sequence; identical to SEQ ID NO: 16428
  Probe

SEQ ID NO: 45157 - DNA, 37 bp, Artificial Sequence; identical to SEQ ID NO: 16430
  Probe

SEQ ID NO: 45158 - DNA, 33 bp, Artificial Sequence; identical to SEQ ID NO: 3289
  Probe

SEQ ID NO: 45159 - DNA, 34 bp, Artificial Sequence; identical to SEQ ID NO: 289
  Probe

SEQ ID NO: 45160 - DNA, 28 bp, Artificial Sequence
  Probe
agcccggtaatcgcataaaacttaaaac

SEQ ID NO: 45161 - DNA, 30 bp, Artificial Sequence; identical to SEQ ID NO: 16435
  Probe

SEQ ID NO: 45162 - DNA, 35 bp, Artificial Sequence
  Probe
agcccggtaatcgcataaaacttaaaactttacag

SEQ ID NO: 45163 - DNA, 36 bp, Artificial Sequence
  Probe
agcccggtaatcgcataaaacttaaaactttacagt

SEQ ID NO: 45164 - DNA, 39 bp, Artificial Sequence
  Probe
agcccggtaatcgcataaaacttaaaactttacagtcag

SEQ ID NO: 45165 - DNA, 42 bp, Artificial Sequence
  Probe
agcccggtaatcgcataaaacttaaaactttacagtcagagg

SEQ ID NO: 45166 - DNA, 44 bp, Artificial Sequence; identical to SEQ ID NO: 3293
  Probe

SEQ ID NO: 45167 - DNA, 45 bp, Artificial Sequence; identical to SEQ ID NO: 3294
  Probe

SEQ ID NO: 45168 - DNA, 49 bp, Artificial Sequence; identical to SEQ ID NO: 3295
  Probe

SEQ ID NO: 45169 - DNA, 50 bp, Artificial Sequence; identical to SEQ ID NO: 3296
  Probe

SEQ ID NO: 45170 - DNA, 21 bp, Artificial Sequence
  Probe
agccctcagtaagttgcaata

SEQ ID NO: 45171 - DNA, 23 bp, Artificial Sequence
  Probe
agccctcagtaagttgcaatact

SEQ ID NO: 45172 - DNA, 28 bp, Artificial Sequence
  Probe
agccctcagtaagttgcaatacttaatt

SEQ ID NO: 45173 - DNA, 31 bp, Artificial Sequence
  Probe
agccctcagtaagttgcaatacttaatttct

SEQ ID NO: 45174 - DNA, 37 bp, Artificial Sequence; identical to SEQ ID NO: 27807
  Probe

SEQ ID NO: 45175 - DNA, 16 bp, Artificial Sequence
  Probe
agcctcacctggagca

SEQ ID NO: 45176 - DNA, 31 bp, Artificial Sequence; identical to SEQ ID NO: 295
  Probe

SEQ ID NO: 45177 - DNA, 33 bp, Artificial Sequence; identical to SEQ ID NO: 3302
  Probe

SEQ ID NO: 45178 - DNA, 34 bp, Artificial Sequence; identical to SEQ ID NO: 3303
  Probe

SEQ ID NO: 45179 - DNA, 32 bp, Artificial Sequence; identical to SEQ ID NO: 299
  Probe

SEQ ID NO: 45180 - DNA, 34 bp, Artificial Sequence; identical to SEQ ID NO: 3306
  Probe

SEQ ID NO: 45181 - DNA, 19 bp, Artificial Sequence
  Probe
agcgcaagtaggtctacaa

SEQ ID NO: 45182 - DNA, 50 bp, Artificial Sequence
  Probe
agcgcattcggctgttaaccgaaaggttggtggttcgagcccacccaggg

SEQ ID NO: 45183 - DNA, 31 bp, Artificial Sequence; identical to SEQ ID NO: 16479
  Probe

SEQ ID NO: 45184 - DNA, 34 bp, Artificial Sequence; identical to SEQ ID NO: 16482
  Probe

SEQ ID NO: 45185 - DNA, 50 bp, Artificial Sequence
  Probe
agcggaagcgtgctgggcccataacccagaggtcgatggatcgaaaccat

SEQ ID NO: 45186 - DNA, 50 bp, Artificial Sequence
  Probe
agcgtgctgggcccataacccagaggtcgatggatcgaaaccatcctctg

SEQ ID NO: 45187 - DNA, 31 bp, Artificial Sequence; identical to SEQ ID NO: 3315
  Probe

SEQ ID NO: 45188 - DNA, 25 bp, Artificial Sequence
  Probe
agctaaataagctatcgggcccata

SEQ ID NO: 45189 - DNA, 26 bp, Artificial Sequence
  Probe
agctaaataagctatcgggcccatac

SEQ ID NO: 45190 - DNA, 27 bp, Artificial Sequence
  Probe
agctaaataagctatcgggcccatacc

SEQ ID NO: 45191 - DNA, 28 bp, Artificial Sequence
  Probe
agctaaataagctatcgggcccataccc

SEQ ID NO: 45192 - DNA, 29 bp, Artificial Sequence
  Probe
agctaaataagctatcgggcccatacccc

SEQ ID NO: 45193 - DNA, 20 bp, Artificial Sequence
  Probe
agctatcgggcccatacccc

SEQ ID NO: 45194 - DNA, 21 bp, Artificial Sequence
  Probe
agctatcgggcccataccccg

SEQ ID NO: 45195 - DNA, 22 bp, Artificial Sequence
  Probe
agctatcgggcccataccccga

SEQ ID NO: 45196 - DNA, 23 bp, Artificial Sequence
  Probe
agctatcgggcccataccccgaa

SEQ ID NO: 45197 - DNA, 24 bp, Artificial Sequence
  Probe
agctatcgggcccataccccgaaa

SEQ ID NO: 45198 - DNA, 25 bp, Artificial Sequence
  Probe
agctatcgggcccataccccgaaaa

SEQ ID NO: 45199 - DNA, 26 bp, Artificial Sequence
  Probe
agctatcgggcccataccccgaaaat

SEQ ID NO: 45200 - DNA, 27 bp, Artificial Sequence
  Probe
agctatcgggcccataccccgaaaatg

SEQ ID NO: 45201 - DNA, 28 bp, Artificial Sequence
  Probe
agctatcgggcccataccccgaaaatgt

SEQ ID NO: 45202 - DNA, 29 bp, Artificial Sequence
  Probe
agctatcgggcccataccccgaaaatgtt

SEQ ID NO: 45203 - DNA, 30 bp, Artificial Sequence; identical to SEQ ID NO: 3337
  Probe

SEQ ID NO: 45204 - DNA, 31 bp, Artificial Sequence; identical to SEQ ID NO: 3338
  Probe

SEQ ID NO: 45205 - DNA, 33 bp, Artificial Sequence; identical to SEQ ID NO: 3340
  Probe

SEQ ID NO: 45206 - DNA, 34 bp, Artificial Sequence; identical to SEQ ID NO: 3341
  Probe

SEQ ID NO: 45207 - DNA, 36 bp, Artificial Sequence; identical to SEQ ID NO: 27866
  Probe

SEQ ID NO: 45208 - DNA, 40 bp, Artificial Sequence; identical to SEQ ID NO: 3342
  Probe

SEQ ID NO: 45209 - DNA, 45 bp, Artificial Sequence; identical to SEQ ID NO: 3345
  Probe

SEQ ID NO: 45210 - DNA, 48 bp, Artificial Sequence; identical to SEQ ID NO: 3347
  Probe

SEQ ID NO: 45211 - DNA, 49 bp, Artificial Sequence; identical to SEQ ID NO: 3348
  Probe

SEQ ID NO: 45212 - DNA, 50 bp, Artificial Sequence; identical to SEQ ID NO: 303
  Probe

SEQ ID NO: 45213 - DNA, 25 bp, Artificial Sequence
  Probe
agctcacaagaactgctaactcatg

SEQ ID NO: 45214 - DNA, 35 bp, Artificial Sequence
  Probe
agctcacaagaactgctaactcatgcccccatgtc

SEQ ID NO: 45215 - DNA, 40 bp, Artificial Sequence; identical to SEQ ID NO: 27870
  Probe

SEQ ID NO: 45216 - DNA, 25 bp, Artificial Sequence
  Probe
agctcagtcggtagagcatcagact

SEQ ID NO: 45217 - DNA, 25 bp, Artificial Sequence
  Probe
agctcagtcggtagagcatgagact

SEQ ID NO: 45218 - DNA, 25 bp, Artificial Sequence
  Probe
agctcagtcggtagagcatgggact

SEQ ID NO: 45219 - DNA, 18 bp, Artificial Sequence
  Probe
agctccgaggtgattttc

SEQ ID NO: 45220 - DNA, 21 bp, Artificial Sequence
  Probe
agctccgaggtgattttcata

SEQ ID NO: 45221 - DNA, 29 bp, Artificial Sequence
  Probe
agctccgaggtgattttcatattgaattg

SEQ ID NO: 45222 - DNA, 30 bp, Artificial Sequence; identical to SEQ ID NO: 314
  Probe

SEQ ID NO: 45223 - DNA, 33 bp, Artificial Sequence; identical to SEQ ID NO: 3363
  Probe

SEQ ID NO: 45224 - DNA, 35 bp, Artificial Sequence; identical to SEQ ID NO: 3364
  Probe

SEQ ID NO: 45225 - DNA, 38 bp, Artificial Sequence; identical to SEQ ID NO: 3366
  Probe

SEQ ID NO: 45226 - DNA, 39 bp, Artificial Sequence; identical to SEQ ID NO: 3367
  Probe

SEQ ID NO: 45227 - DNA, 44 bp, Artificial Sequence; identical to SEQ ID NO: 3369
  Probe

SEQ ID NO: 45228 - DNA, 45 bp, Artificial Sequence; identical to SEQ ID NO: 3370
  Probe

SEQ ID NO: 45229 - DNA, 48 bp, Artificial Sequence; identical to SEQ ID NO: 3372
  Probe

SEQ ID NO: 45230 - DNA, 49 bp, Artificial Sequence; identical to SEQ ID NO: 3373
  Probe

SEQ ID NO: 45231 - DNA, 50 bp, Artificial Sequence; identical to SEQ ID NO: 3374
  Probe

SEQ ID NO: 45232 - DNA, 32 bp, Artificial Sequence; identical to SEQ ID NO: 16570
  Probe

SEQ ID NO: 45233 - DNA, 35 bp, Artificial Sequence
  Probe
agctggggattgtgggttcgagtcccatctgggtc

SEQ ID NO: 45234 - DNA, 36 bp, Artificial Sequence; identical to SEQ ID NO: 16572
  Probe

SEQ ID NO: 45235 - DNA, 39 bp, Artificial Sequence; identical to SEQ ID NO: 3375
  Probe

SEQ ID NO: 45236 - DNA, 23 bp, Artificial Sequence
  Probe
agctgttaactaagtgtttgtgg

SEQ ID NO: 45237 - DNA, 28 bp, Artificial Sequence
  Probe
agctgttaactaagtgtttgtgggttta

SEQ ID NO: 45238 - DNA, 31 bp, Artificial Sequence
  Probe
agctgttaactaagtgtttgtgggtttaagt

SEQ ID NO: 45239 - DNA, 39 bp, Artificial Sequence; identical to SEQ ID NO: 16575
  Probe

SEQ ID NO: 45240 - DNA, 45 bp, Artificial Sequence
  Probe
agctgttaactaagtgtttgtgggtttaagtcccattggtctagt

SEQ ID NO: 45241 - DNA, 46 bp, Artificial Sequence; identical to SEQ ID NO: 16577
  Probe

SEQ ID NO: 45242 - DNA, 50 bp, Artificial Sequence
  Probe
agctgttaactaagtgtttgtgggtttaagtcccattggtctagtaaggg

SEQ ID NO: 45243 - DNA, 24 bp, Artificial Sequence
  Probe
agcttaaacccccttatttctagg

SEQ ID NO: 45244 - DNA, 25 bp, Artificial Sequence
  Probe
agcttaaacccccttatttctagga

SEQ ID NO: 45245 - DNA, 25 bp, Artificial Sequence
  Probe
agcttcaaacctgccggggcttctc

SEQ ID NO: 45246 - DNA, 16 bp, Artificial Sequence
  Probe
agctttggggggttcg

SEQ ID NO: 45247 - DNA, 19 bp, Artificial Sequence
  Probe
agctttggggggttcgatt

SEQ ID NO: 45248 - DNA, 26 bp, Artificial Sequence
  Probe
agctttggggggttcgattccttcct

SEQ ID NO: 45249 - DNA, 27 bp, Artificial Sequence
  Probe
agctttggggggttcgattccttcctt

SEQ ID NO: 45250 - DNA, 28 bp, Artificial Sequence
  Probe
agctttggggggttcgattccttccttt

SEQ ID NO: 45251 - DNA, 32 bp, Artificial Sequence; identical to SEQ ID NO: 3388
  Probe

SEQ ID NO: 45252 - DNA, 33 bp, Artificial Sequence; identical to SEQ ID NO: 3389
  Probe

SEQ ID NO: 45253 - DNA, 34 bp, Artificial Sequence; identical to SEQ ID NO: 3390
  Probe

SEQ ID NO: 45254 - DNA, 35 bp, Artificial Sequence; identical to SEQ ID NO: 3391
  Probe

SEQ ID NO: 45255 - DNA, 26 bp, Artificial Sequence
  Probe
agctttgggtgctaatggtggagtta

SEQ ID NO: 45256 - DNA, 35 bp, Artificial Sequence; identical to SEQ ID NO: 16616
  Probe

SEQ ID NO: 45257 - DNA, 30 bp, Artificial Sequence; identical to SEQ ID NO: 16622
  Probe

SEQ ID NO: 45258 - DNA, 31 bp, Artificial Sequence; identical to SEQ ID NO: 3397
  Probe

SEQ ID NO: 45259 - DNA, 32 bp, Artificial Sequence; identical to SEQ ID NO: 3398
  Probe

SEQ ID NO: 45260 - DNA, 19 bp, Artificial Sequence
  Probe
aggagatttcaacttaact

SEQ ID NO: 45261 - DNA, 23 bp, Artificial Sequence
  Probe
aggagatttcaacttaacttgac

SEQ ID NO: 45262 - DNA, 24 bp, Artificial Sequence
  Probe
aggagatttcaacttaacttgacc

SEQ ID NO: 45263 - DNA, 25 bp, Artificial Sequence
  Probe
aggagatttcaacttaacttgaccg

SEQ ID NO: 45264 - DNA, 26 bp, Artificial Sequence
  Probe
aggagatttcaacttaacttgaccgc

SEQ ID NO: 45265 - DNA, 27 bp, Artificial Sequence
  Probe
aggagatttcaacttaacttgaccgct

SEQ ID NO: 45266 - DNA, 28 bp, Artificial Sequence
  Probe
aggagatttcaacttaacttgaccgctc

SEQ ID NO: 45267 - DNA, 29 bp, Artificial Sequence
  Probe
aggagatttcaacttaacttgaccgctct

SEQ ID NO: 45268 - DNA, 31 bp, Artificial Sequence; identical to SEQ ID NO: 3411
  Probe

SEQ ID NO: 45269 - DNA, 32 bp, Artificial Sequence; identical to SEQ ID NO: 3412
  Probe

SEQ ID NO: 45270 - DNA, 33 bp, Artificial Sequence; identical to SEQ ID NO: 3413
  Probe

SEQ ID NO: 45271 - DNA, 34 bp, Artificial Sequence; identical to SEQ ID NO: 3414
  Probe

SEQ ID NO: 45272 - DNA, 17 bp, Artificial Sequence
  Probe
aggagcttaaaccccct

SEQ ID NO: 45273 - DNA, 27 bp, Artificial Sequence
  Probe
aggagcttaaacccccttatttctagg

SEQ ID NO: 45274 - DNA, 21 bp, Artificial Sequence
  Probe
aggatggccgagcggtctaag

SEQ ID NO: 45275 - DNA, 21 bp, Artificial Sequence
  Probe
aggatggccgagtggtctaag

SEQ ID NO: 45276 - DNA, 27 bp, Artificial Sequence
  Probe
aggatggggtgtgataggtggcacgga

SEQ ID NO: 45277 - DNA, 29 bp, Artificial Sequence
  Probe
aggattcctggttttcacccaggcggccc

SEQ ID NO: 45278 - DNA, 50 bp, Artificial Sequence; identical to SEQ ID NO: 3418
  Probe

SEQ ID NO: 45279 - DNA, 50 bp, Artificial Sequence
  Probe
aggattcctggttttcacccaggtggcccgggttcgactcccggtatggg

SEQ ID NO: 45280 - DNA, 28 bp, Artificial Sequence
  Probe
aggattcggcgctctcaccgccgcggcc

SEQ ID NO: 45281 - DNA, 30 bp, Artificial Sequence; identical to SEQ ID NO: 16665
  Probe

SEQ ID NO: 45282 - DNA, 50 bp, Artificial Sequence; identical to SEQ ID NO: 3419
  Probe

SEQ ID NO: 45283 - DNA, 32 bp, Artificial Sequence
  Probe
aggccccaaaaattttggtgcaactccaaata

SEQ ID NO: 45284 - DNA, 41 bp, Artificial Sequence
  Probe
aggccccaaaaattttggtgcaactccaaataaaagtaata

SEQ ID NO: 45285 - DNA, 24 bp, Artificial Sequence
  Probe
aggccccgggttcaatccccggca

SEQ ID NO: 45286 - DNA, 32 bp, Artificial Sequence
  Probe
aggccccgggttcgatccccggcatctccatt

SEQ ID NO: 45287 - DNA, 33 bp, Artificial Sequence; identical to SEQ ID NO: 16671
  Probe

SEQ ID NO: 45288 - DNA, 33 bp, Artificial Sequence
  Probe
aggcctcgtggcgcaacggtagcgcgtctgact

SEQ ID NO: 45289 - DNA, 35 bp, Artificial Sequence; identical to SEQ ID NO: 38270
  Probe

SEQ ID NO: 45290 - DNA, 36 bp, Artificial Sequence; identical to SEQ ID NO: 16675
  Probe

SEQ ID NO: 45291 - DNA, 37 bp, Artificial Sequence; identical to SEQ ID NO: 16676
  Probe

SEQ ID NO: 45292 - DNA, 40 bp, Artificial Sequence; identical to SEQ ID NO: 16678
  Probe

SEQ ID NO: 45293 - DNA, 29 bp, Artificial Sequence
  Probe
aggcggcccgggttcgactcccggtgtgg

SEQ ID NO: 45294 - DNA, 33 bp, Artificial Sequence; identical to SEQ ID NO: 327
  Probe

SEQ ID NO: 45295 - DNA, 35 bp, Artificial Sequence; identical to SEQ ID NO: 3427
  Probe

SEQ ID NO: 45296 - DNA, 44 bp, Artificial Sequence; identical to SEQ ID NO: 16682
  Probe

SEQ ID NO: 45297 - DNA, 50 bp, Artificial Sequence; identical to SEQ ID NO: 38275
  Probe

SEQ ID NO: 45298 - DNA, 25 bp, Artificial Sequence
  Probe
aggctaaatcctatatatcttaatg

SEQ ID NO: 45299 - DNA, 28 bp, Artificial Sequence
  Probe
aggctgcgtgttcgaatcacgtcggggt

SEQ ID NO: 45300 - DNA, 33 bp, Artificial Sequence
  Probe
aggctgcgtgttcgaatcacgtcggggtcaaac

SEQ ID NO: 45301 - DNA, 23 bp, Artificial Sequence
  Probe
aggcttacgaccccttatttacc

SEQ ID NO: 45302 - DNA, 24 bp, Artificial Sequence
  Probe
aggcttacgaccccttatttaccg

SEQ ID NO: 45303 - DNA, 25 bp, Artificial Sequence
  Probe
agggatgggttcgattctcatagtc

SEQ ID NO: 45304 - DNA, 26 bp, Artificial Sequence
  Probe
agggatgggttcgattctcatagtcc

SEQ ID NO: 45305 - DNA, 30 bp, Artificial Sequence
  Probe
agggatgggttcgattctcatagtcctaga

SEQ ID NO: 45306 - DNA, 32 bp, Artificial Sequence; identical to SEQ ID NO: 3433
  Probe

SEQ ID NO: 45307 - DNA, 25 bp, Artificial Sequence
  Probe
agggattgtgggttcgagtcccatc

SEQ ID NO: 45308 - DNA, 28 bp, Artificial Sequence
  Probe
agggattgtgggttcgagtcccatctgg

SEQ ID NO: 45309 - DNA, 32 bp, Artificial Sequence; identical to SEQ ID NO: 3436
  Probe

SEQ ID NO: 45310 - DNA, 33 bp, Artificial Sequence
  Probe
agggggtatagctcagtggtagagcatttgact

SEQ ID NO: 45311 - DNA, 17 bp, Artificial Sequence
  Probe
aggggtatgattctcgc

SEQ ID NO: 45312 - DNA, 18 bp, Artificial Sequence
  Probe
aggggtatgattctcgct

SEQ ID NO: 45313 - DNA, 26 bp, Artificial Sequence
  Probe
aggggttaggcctctttttaccagct

SEQ ID NO: 45314 - DNA, 30 bp, Artificial Sequence; identical to SEQ ID NO: 9178
  Probe

SEQ ID NO: 45315 - DNA, 28 bp, Artificial Sequence
  Probe
agggtcgtgggttcgagccccacgttgg

SEQ ID NO: 45316 - DNA, 29 bp, Artificial Sequence
  Probe
agggtcgtgggttcgagccccacgttggg

SEQ ID NO: 45317 - DNA, 31 bp, Artificial Sequence; identical to SEQ ID NO: 333
  Probe

SEQ ID NO: 45318 - DNA, 32 bp, Artificial Sequence
  Probe
agggtcgtgggttcgagccccacgttgggcgc

SEQ ID NO: 45319 - DNA, 31 bp, Artificial Sequence
  Probe
agggtgcttagctgttaactaagtgtttgtg

SEQ ID NO: 45320 - DNA, 22 bp, Artificial Sequence
  Probe
aggtcagctaaataagctatcg

SEQ ID NO: 45321 - DNA, 24 bp, Artificial Sequence
  Probe
aggtcagctaaataagctatcggg

SEQ ID NO: 45322 - DNA, 25 bp, Artificial Sequence
  Probe
aggtcagctaaataagctatcgggc

SEQ ID NO: 45323 - DNA, 26 bp, Artificial Sequence
  Probe
aggtcagctaaataagctatcgggcc

SEQ ID NO: 45324 - DNA, 28 bp, Artificial Sequence
  Probe
aggtcagctaaataagctatcgggccca

SEQ ID NO: 45325 - DNA, 29 bp, Artificial Sequence
  Probe
aggtcagctaaataagctatcgggcccat

SEQ ID NO: 45326 - DNA, 30 bp, Artificial Sequence; identical to SEQ ID NO: 3454
  Probe

SEQ ID NO: 45327 - DNA, 31 bp, Artificial Sequence; identical to SEQ ID NO: 3455
  Probe

SEQ ID NO: 45328 - DNA, 32 bp, Artificial Sequence; identical to SEQ ID NO: 3456
  Probe

SEQ ID NO: 45329 - DNA, 33 bp, Artificial Sequence; identical to SEQ ID NO: 3457
  Probe

SEQ ID NO: 45330 - DNA, 34 bp, Artificial Sequence; identical to SEQ ID NO: 3458
  Probe

SEQ ID NO: 45331 - DNA, 37 bp, Artificial Sequence; identical to SEQ ID NO: 3461
  Probe

SEQ ID NO: 45332 - DNA, 38 bp, Artificial Sequence; identical to SEQ ID NO: 3462
  Probe

SEQ ID NO: 45333 - DNA, 39 bp, Artificial Sequence; identical to SEQ ID NO: 3463
  Probe

SEQ ID NO: 45334 - DNA, 40 bp, Artificial Sequence; identical to SEQ ID NO: 3464
  Probe

SEQ ID NO: 45335 - DNA, 41 bp, Artificial Sequence; identical to SEQ ID NO: 3465
  Probe

SEQ ID NO: 45336 - DNA, 42 bp, Artificial Sequence; identical to SEQ ID NO: 3466
  Probe

SEQ ID NO: 45337 - DNA, 43 bp, Artificial Sequence; identical to SEQ ID NO: 3467
  Probe

SEQ ID NO: 45338 - DNA, 44 bp, Artificial Sequence; identical to SEQ ID NO: 3468
  Probe

SEQ ID NO: 45339 - DNA, 45 bp, Artificial Sequence; identical to SEQ ID NO: 3469
  Probe

SEQ ID NO: 45340 - DNA, 46 bp, Artificial Sequence; identical to SEQ ID NO: 3470
  Probe

SEQ ID NO: 45341 - DNA, 49 bp, Artificial Sequence; identical to SEQ ID NO: 3473
  Probe

SEQ ID NO: 45342 - DNA, 50 bp, Artificial Sequence; identical to SEQ ID NO: 3474
  Probe

SEQ ID NO: 45343 - DNA, 33 bp, Artificial Sequence
  Probe
aggtccccggttcgaaaccgggcggaaacacct

SEQ ID NO: 45344 - DNA, 31 bp, Artificial Sequence
  Probe
aggtcccgggttcaaatcccggacgagcccc

SEQ ID NO: 45345 - DNA, 33 bp, Artificial Sequence; identical to SEQ ID NO: 16757
  Probe

SEQ ID NO: 45346 - DNA, 33 bp, Artificial Sequence; identical to SEQ ID NO: 16758
  Probe

SEQ ID NO: 45347 - DNA, 33 bp, Artificial Sequence; identical to SEQ ID NO: 3476
  Probe

SEQ ID NO: 45348 - DNA, 31 bp, Artificial Sequence
  Probe
aggtcctgagttcgaacctcagagggggcaa

SEQ ID NO: 45349 - DNA, 31 bp, Artificial Sequence
  Probe
aggtcctgagttcgaacctcagagggggcag

SEQ ID NO: 45350 - DNA, 32 bp, Artificial Sequence
  Probe
aggtcctgagttcgaacctcagagggggcagc

SEQ ID NO: 45351 - DNA, 33 bp, Artificial Sequence
  Probe
aggtcctgagttcgaacctcagagggggcagct

SEQ ID NO: 45352 - DNA, 37 bp, Artificial Sequence; identical to SEQ ID NO: 16766
  Probe

SEQ ID NO: 45353 - DNA, 38 bp, Artificial Sequence; identical to SEQ ID NO: 16767
  Probe

SEQ ID NO: 45354 - DNA, 39 bp, Artificial Sequence; identical to SEQ ID NO: 16768
  Probe

SEQ ID NO: 45355 - DNA, 40 bp, Artificial Sequence; identical to SEQ ID NO: 16769
  Probe

SEQ ID NO: 45356 - DNA, 41 bp, Artificial Sequence; identical to SEQ ID NO: 16770
  Probe

SEQ ID NO: 45357 - DNA, 32 bp, Artificial Sequence; identical to SEQ ID NO: 3477
  Probe

SEQ ID NO: 45358 - DNA, 33 bp, Artificial Sequence; identical to SEQ ID NO: 3478
  Probe

SEQ ID NO: 45359 - DNA, 33 bp, Artificial Sequence
  Probe
aggtcctgggttcgagccccagtggaaccatag

SEQ ID NO: 45360 - DNA, 33 bp, Artificial Sequence; identical to SEQ ID NO: 3479
  Probe

SEQ ID NO: 45361 - DNA, 31 bp, Artificial Sequence
  Probe
aggtcgcgggttcgatccccgtacgggccac

SEQ ID NO: 45362 - DNA, 33 bp, Artificial Sequence; identical to SEQ ID NO: 3483
  Probe

SEQ ID NO: 45363 - DNA, 33 bp, Artificial Sequence; identical to SEQ ID NO: 3485
  Probe

SEQ ID NO: 45364 - DNA, 33 bp, Artificial Sequence; identical to SEQ ID NO: 16780
  Probe

SEQ ID NO: 45365 - DNA, 30 bp, Artificial Sequence
  Probe
aggtcgtgagttcgatcctcacacggggca

SEQ ID NO: 45366 - DNA, 33 bp, Artificial Sequence; identical to SEQ ID NO: 3486
  Probe

SEQ ID NO: 45367 - DNA, 29 bp, Artificial Sequence
  Probe
aggtgcctcgttagcgcagtaggtagcgc

SEQ ID NO: 45368 - DNA, 35 bp, Artificial Sequence; identical to SEQ ID NO: 16794
  Probe

SEQ ID NO: 45369 - DNA, 36 bp, Artificial Sequence; identical to SEQ ID NO: 16795
  Probe

SEQ ID NO: 45370 - DNA, 20 bp, Artificial Sequence
  Probe
aggtggcacggagaattttg

SEQ ID NO: 45371 - DNA, 31 bp, Artificial Sequence; identical to SEQ ID NO: 12739
  Probe

SEQ ID NO: 45372 - DNA, 32 bp, Artificial Sequence; identical to SEQ ID NO: 3488
  Probe

SEQ ID NO: 45373 - DNA, 35 bp, Artificial Sequence; identical to SEQ ID NO: 3490
  Probe

SEQ ID NO: 45374 - DNA, 27 bp, Artificial Sequence
  Probe
aggttccgggttcgagtcccggcggag

SEQ ID NO: 45375 - DNA, 28 bp, Artificial Sequence
  Probe
aggttccgggttcgagtcccggcggagt

SEQ ID NO: 45376 - DNA, 21 bp, Artificial Sequence
  Probe
aggttcgaatcctgccgacta

SEQ ID NO: 45377 - DNA, 26 bp, Artificial Sequence
  Probe
aggttcgaatcctgctcacagcgtca

SEQ ID NO: 45378 - DNA, 26 bp, Artificial Sequence
  Probe
aggttcgaatcctgttcgtgacgggt

SEQ ID NO: 45379 - DNA, 33 bp, Artificial Sequence; identical to SEQ ID NO: 3495
  Probe

SEQ ID NO: 45380 - DNA, 32 bp, Artificial Sequence
  Probe
aggttggtggttcgagcccacccagggacgcc

SEQ ID NO: 45381 - DNA, 33 bp, Artificial Sequence; identical to SEQ ID NO: 3496
  Probe

SEQ ID NO: 45382 - DNA, 28 bp, Artificial Sequence
  Probe
aggttggtggttcgatcccacccaggga

SEQ ID NO: 45383 - DNA, 28 bp, Artificial Sequence
  Probe
aggttgtgagttcgagcctcacctggag

SEQ ID NO: 45384 - DNA, 30 bp, Artificial Sequence
  Probe
aggttgtgagttcgagcctcacctggagca

SEQ ID NO: 45385 - DNA, 32 bp, Artificial Sequence
  Probe
aggttgtgagttcgagcctcacctggagcatt

SEQ ID NO: 45386 - DNA, 33 bp, Artificial Sequence; identical to SEQ ID NO: 16822
  Probe

SEQ ID NO: 45387 - DNA, 27 bp, Artificial Sequence
  Probe
aggtttggtcctagcctttctattagc

SEQ ID NO: 45388 - DNA, 43 bp, Artificial Sequence
  Probe
agtaaacaggagatcctgggttcgaatcccagcggggccttac

SEQ ID NO: 45389 - DNA, 43 bp, Artificial Sequence
  Probe
agtaaacaggagatcctgggttcgaatcccagcggtgcctccg

SEQ ID NO: 45390 - DNA, 25 bp, Artificial Sequence
  Probe
agtaaataataggagcttaaacccc

SEQ ID NO: 45391 - DNA, 33 bp, Artificial Sequence
  Probe
agtaaataataggagcttaaacccccttatttc

SEQ ID NO: 45392 - DNA, 37 bp, Artificial Sequence; identical to SEQ ID NO: 3499
  Probe

SEQ ID NO: 45393 - DNA, 38 bp, Artificial Sequence; identical to SEQ ID NO: 3500
  Probe

SEQ ID NO: 45394 - DNA, 16 bp, Artificial Sequence
  Probe
agtaaggtcagctaaa

SEQ ID NO: 45395 - DNA, 17 bp, Artificial Sequence
  Probe
agtaaggtcagctaaat

SEQ ID NO: 45396 - DNA, 18 bp, Artificial Sequence
  Probe
agtaaggtcagctaaata

SEQ ID NO: 45397 - DNA, 19 bp, Artificial Sequence
  Probe
agtaaggtcagctaaataa

SEQ ID NO: 45398 - DNA, 20 bp, Artificial Sequence
  Probe
agtaaggtcagctaaataag

SEQ ID NO: 45399 - DNA, 21 bp, Artificial Sequence
  Probe
agtaaggtcagctaaataagc

SEQ ID NO: 45400 - DNA, 22 bp, Artificial Sequence
  Probe
agtaaggtcagctaaataagct

SEQ ID NO: 45401 - DNA, 23 bp, Artificial Sequence
  Probe
agtaaggtcagctaaataagcta

SEQ ID NO: 45402 - DNA, 24 bp, Artificial Sequence
  Probe
agtaaggtcagctaaataagctat

SEQ ID NO: 45403 - DNA, 25 bp, Artificial Sequence
  Probe
agtaaggtcagctaaataagctatc

SEQ ID NO: 45404 - DNA, 26 bp, Artificial Sequence
  Probe
agtaaggtcagctaaataagctatcg

SEQ ID NO: 45405 - DNA, 27 bp, Artificial Sequence
  Probe
agtaaggtcagctaaataagctatcgg

SEQ ID NO: 45406 - DNA, 28 bp, Artificial Sequence
  Probe
agtaaggtcagctaaataagctatcggg

SEQ ID NO: 45407 - DNA, 29 bp, Artificial Sequence
  Probe
agtaaggtcagctaaataagctatcgggc

SEQ ID NO: 45408 - DNA, 30 bp, Artificial Sequence; identical to SEQ ID NO: 3514
  Probe

SEQ ID NO: 45409 - DNA, 31 bp, Artificial Sequence; identical to SEQ ID NO: 3515
  Probe

SEQ ID NO: 45410 - DNA, 32 bp, Artificial Sequence; identical to SEQ ID NO: 3516
  Probe

SEQ ID NO: 45411 - DNA, 33 bp, Artificial Sequence; identical to SEQ ID NO: 3517
  Probe

SEQ ID NO: 45412 - DNA, 34 bp, Artificial Sequence; identical to SEQ ID NO: 3518
  Probe

SEQ ID NO: 45413 - DNA, 35 bp, Artificial Sequence; identical to SEQ ID NO: 3519
  Probe

SEQ ID NO: 45414 - DNA, 36 bp, Artificial Sequence; identical to SEQ ID NO: 3520
  Probe

SEQ ID NO: 45415 - DNA, 37 bp, Artificial Sequence; identical to SEQ ID NO: 3521
  Probe

SEQ ID NO: 45416 - DNA, 38 bp, Artificial Sequence; identical to SEQ ID NO: 3522
  Probe

SEQ ID NO: 45417 - DNA, 39 bp, Artificial Sequence; identical to SEQ ID NO: 3523
  Probe

SEQ ID NO: 45418 - DNA, 40 bp, Artificial Sequence; identical to SEQ ID NO: 3524
  Probe

SEQ ID NO: 45419 - DNA, 41 bp, Artificial Sequence; identical to SEQ ID NO: 3525
  Probe

SEQ ID NO: 45420 - DNA, 42 bp, Artificial Sequence; identical to SEQ ID NO: 3526
  Probe

SEQ ID NO: 45421 - DNA, 43 bp, Artificial Sequence; identical to SEQ ID NO: 3527
  Probe

SEQ ID NO: 45422 - DNA, 44 bp, Artificial Sequence; identical to SEQ ID NO: 3528
  Probe

SEQ ID NO: 45423 - DNA, 45 bp, Artificial Sequence; identical to SEQ ID NO: 3529
  Probe

SEQ ID NO: 45424 - DNA, 46 bp, Artificial Sequence; identical to SEQ ID NO: 3530
  Probe

SEQ ID NO: 45425 - DNA, 47 bp, Artificial Sequence; identical to SEQ ID NO: 3531
  Probe

SEQ ID NO: 45426 - DNA, 48 bp, Artificial Sequence; identical to SEQ ID NO: 3532
  Probe

SEQ ID NO: 45427 - DNA, 49 bp, Artificial Sequence; identical to SEQ ID NO: 3533
  Probe

SEQ ID NO: 45428 - DNA, 50 bp, Artificial Sequence; identical to SEQ ID NO: 3534
  Probe

SEQ ID NO: 45429 - DNA, 16 bp, Artificial Sequence
  Probe
agtaccgttaacttcc

SEQ ID NO: 45430 - DNA, 17 bp, Artificial Sequence
  Probe
agtaccgttaacttcca

SEQ ID NO: 45431 - DNA, 27 bp, Artificial Sequence
  Probe
agtaccgttaacttccaattaactagt

SEQ ID NO: 45432 - DNA, 28 bp, Artificial Sequence
  Probe
agtaccgttaacttccaattaactagtt

SEQ ID NO: 45433 - DNA, 31 bp, Artificial Sequence; identical to SEQ ID NO: 16865
  Probe

SEQ ID NO: 45434 - DNA, 32 bp, Artificial Sequence; identical to SEQ ID NO: 3536
  Probe

SEQ ID NO: 45435 - DNA, 35 bp, Artificial Sequence; identical to SEQ ID NO: 12743
  Probe

SEQ ID NO: 45436 - DNA, 49 bp, Artificial Sequence
  Probe
agtaccgttaacttccaattaactagttttgacaacattcaaaaaagag

SEQ ID NO: 45437 - DNA, 50 bp, Artificial Sequence; identical to SEQ ID NO: 3540
  Probe

SEQ ID NO: 45438 - DNA, 23 bp, Artificial Sequence
  Probe
agtcagaggttcaattcctcttc

SEQ ID NO: 45439 - DNA, 24 bp, Artificial Sequence
  Probe
agtcagaggttcaattcctcttct

SEQ ID NO: 45440 - DNA, 25 bp, Artificial Sequence
  Probe
agtcagaggttcaattcctcttctt

SEQ ID NO: 45441 - DNA, 26 bp, Artificial Sequence
  Probe
agtcagaggttcaattcctcttctta

SEQ ID NO: 45442 - DNA, 32 bp, Artificial Sequence; identical to SEQ ID NO: 3546
  Probe

SEQ ID NO: 45443 - DNA, 17 bp, Artificial Sequence
  Probe
agtcccattggtctagt

SEQ ID NO: 45444 - DNA, 16 bp, Artificial Sequence
  Probe
agtccgtgcgagaata

SEQ ID NO: 45445 - DNA, 19 bp, Artificial Sequence
  Probe
agtccgtgcgagaataatg

SEQ ID NO: 45446 - DNA, 20 bp, Artificial Sequence
  Probe
agtcggtagagcatcagact

SEQ ID NO: 45447 - DNA, 23 bp, Artificial Sequence
  Probe
agtcggtagagcatcagactttt

SEQ ID NO: 45448 - DNA, 16 bp, Artificial Sequence
  Probe
agtcggtagagcatga

SEQ ID NO: 45449 - DNA, 18 bp, Artificial Sequence
  Probe
agtcggtagagcatgaga

SEQ ID NO: 45450 - DNA, 19 bp, Artificial Sequence
  Probe
agtcggtagagcatgagac

SEQ ID NO: 45451 - DNA, 36 bp, Artificial Sequence; identical to SEQ ID NO: 346
  Probe

SEQ ID NO: 45452 - DNA, 37 bp, Artificial Sequence; identical to SEQ ID NO: 3556
  Probe

SEQ ID NO: 45453 - DNA, 18 bp, Artificial Sequence
  Probe
agtcggtagagcatggga

SEQ ID NO: 45454 - DNA, 19 bp, Artificial Sequence
  Probe
agtcggtagagcatgggac

SEQ ID NO: 45455 - DNA, 36 bp, Artificial Sequence; identical to SEQ ID NO: 354
  Probe

SEQ ID NO: 45456 - DNA, 22 bp, Artificial Sequence
  Probe
agtctcataatctgaaggtcct

SEQ ID NO: 45457 - DNA, 26 bp, Artificial Sequence
  Probe
agtctcataatctgaaggtcctgagt

SEQ ID NO: 45458 - DNA, 50 bp, Artificial Sequence
  Probe
agtctcataatctgaaggtcctgagttcgaacctcagagggggcagctgc

SEQ ID NO: 45459 - DNA, 21 bp, Artificial Sequence
  Probe
agtctcataatctgaaggtcg

SEQ ID NO: 45460 - DNA, 24 bp, Artificial Sequence
  Probe
agtctcataatctgaaggtcgtga

SEQ ID NO: 45461 - DNA, 26 bp, Artificial Sequence
  Probe
agtctcataatctgaaggtcgtgagt

SEQ ID NO: 45462 - DNA, 50 bp, Artificial Sequence
  Probe
agtctcataatctgaaggtcgtgagttcgatcctcacacggggcacaata

SEQ ID NO: 45463 - DNA, 43 bp, Artificial Sequence; identical to SEQ ID NO: 3569
  Probe

SEQ ID NO: 45464 - DNA, 18 bp, Artificial Sequence
  Probe
agtgaagcattggactgt

SEQ ID NO: 45465 - DNA, 18 bp, Artificial Sequence
  Probe
agtgcacttggacgaacc

SEQ ID NO: 45466 - DNA, 34 bp, Artificial Sequence; identical to SEQ ID NO: 16917
  Probe

SEQ ID NO: 45467 - DNA, 35 bp, Artificial Sequence
  Probe
agtgcccggctagctcagtcggtagagcatgagac

SEQ ID NO: 45468 - DNA, 36 bp, Artificial Sequence; identical to SEQ ID NO: 16918
  Probe

SEQ ID NO: 45469 - DNA, 24 bp, Artificial Sequence
  Probe
agtggggttttgcagtccttagct

SEQ ID NO: 45470 - DNA, 17 bp, Artificial Sequence
  Probe
agtggtagaattctcgc

SEQ ID NO: 45471 - DNA, 18 bp, Artificial Sequence
  Probe
agtggtagaattctcgcc

SEQ ID NO: 45472 - DNA, 19 bp, Artificial Sequence
  Probe
agtggtagaattctcgcct

SEQ ID NO: 45473 - DNA, 20 bp, Artificial Sequence
  Probe
agtggtagaattctcgcctg

SEQ ID NO: 45474 - DNA, 22 bp, Artificial Sequence
  Probe
agtggtagaattctcgcctgcc

SEQ ID NO: 45475 - DNA, 17 bp, Artificial Sequence
  Probe
agtggtatcatgcaaga

SEQ ID NO: 45476 - DNA, 27 bp, Artificial Sequence
  Probe
agtggtcatcacgttcgcctaacacgc

SEQ ID NO: 45477 - DNA, 40 bp, Artificial Sequence; identical to SEQ ID NO: 16943
  Probe

SEQ ID NO: 45478 - DNA, 17 bp, Artificial Sequence
  Probe
agtggtgagtatccccg

SEQ ID NO: 45479 - DNA, 18 bp, Artificial Sequence
  Probe
agtggtgagtatccccgc

SEQ ID NO: 45480 - DNA, 24 bp, Artificial Sequence
  Probe
agtggtgagtatccccgcctgtca

SEQ ID NO: 45481 - DNA, 26 bp, Artificial Sequence
  Probe
agtggtgagtatccccgcctgtcacg

SEQ ID NO: 45482 - DNA, 36 bp, Artificial Sequence; identical to SEQ ID NO: 12765
  Probe

SEQ ID NO: 45483 - DNA, 36 bp, Artificial Sequence; identical to SEQ ID NO: 12768
  Probe

SEQ ID NO: 45484 - DNA, 19 bp, Artificial Sequence
  Probe
agtggttaggattcggcgc

SEQ ID NO: 45485 - DNA, 20 bp, Artificial Sequence
  Probe
agtggttaggattcggcgct

SEQ ID NO: 45486 - DNA, 24 bp, Artificial Sequence
  Probe
agtggttaggattcggcgctctca

SEQ ID NO: 45487 - DNA, 18 bp, Artificial Sequence
  Probe
agtggttagtactctgcg

SEQ ID NO: 45488 - DNA, 20 bp, Artificial Sequence
  Probe
agtgtgtcaggatggccgag

SEQ ID NO: 45489 - DNA, 21 bp, Artificial Sequence
  Probe
agtgtgtcaggatggccgagt

SEQ ID NO: 45490 - DNA, 25 bp, Artificial Sequence
  Probe
agtgtttgtgggtttaagtcccatt

SEQ ID NO: 45491 - DNA, 26 bp, Artificial Sequence
  Probe
agtgtttgtgggtttaagtcccattg

SEQ ID NO: 45492 - DNA, 27 bp, Artificial Sequence
  Probe
agtgtttgtgggtttaagtcccattgg

SEQ ID NO: 45493 - DNA, 28 bp, Artificial Sequence
  Probe
agtgtttgtgggtttaagtcccattggt

SEQ ID NO: 45494 - DNA, 32 bp, Artificial Sequence; identical to SEQ ID NO: 16995
  Probe

SEQ ID NO: 45495 - DNA, 33 bp, Artificial Sequence; identical to SEQ ID NO: 16996
  Probe

SEQ ID NO: 45496 - DNA, 34 bp, Artificial Sequence; identical to SEQ ID NO: 3601
  Probe

SEQ ID NO: 45497 - DNA, 23 bp, Artificial Sequence
  Probe
agttaaagactttttctctgatt

SEQ ID NO: 45498 - DNA, 24 bp, Artificial Sequence
  Probe
agttaaagactttttctctgattt

SEQ ID NO: 45499 - DNA, 20 bp, Artificial Sequence
  Probe
agttaaagattaagagaacc

SEQ ID NO: 45500 - DNA, 21 bp, Artificial Sequence
  Probe
agttaaagattaagagaacca

SEQ ID NO: 45501 - DNA, 37 bp, Artificial Sequence; identical to SEQ ID NO: 3604
  Probe

SEQ ID NO: 45502 - DNA, 38 bp, Artificial Sequence; identical to SEQ ID NO: 3605
  Probe

SEQ ID NO: 45503 - DNA, 39 bp, Artificial Sequence; identical to SEQ ID NO: 3606
  Probe

SEQ ID NO: 45504 - DNA, 40 bp, Artificial Sequence; identical to SEQ ID NO: 3607
  Probe

SEQ ID NO: 45505 - DNA, 41 bp, Artificial Sequence; identical to SEQ ID NO: 3608
  Probe

SEQ ID NO: 45506 - DNA, 50 bp, Artificial Sequence; identical to SEQ ID NO: 3610
  Probe

SEQ ID NO: 45507 - DNA, 28 bp, Artificial Sequence
  Probe
agttaaattataggctaaatcctatata

SEQ ID NO: 45508 - DNA, 30 bp, Artificial Sequence
  Probe
agttaaattataggctaaatcctatatatc

SEQ ID NO: 45509 - DNA, 23 bp, Artificial Sequence
  Probe
agttcaaatctcgctggggcctc

SEQ ID NO: 45510 - DNA, 22 bp, Artificial Sequence
  Probe
agttcaaatctcggtggaacct

SEQ ID NO: 45511 - DNA, 23 bp, Artificial Sequence
  Probe
agttcaaatctcggtggaacctg

SEQ ID NO: 45512 - DNA, 23 bp, Artificial Sequence
  Probe
agttcaaatctcggtggaacctt

SEQ ID NO: 45513 - DNA, 25 bp, Artificial Sequence
  Probe
agttcgaacctcagagggggcagct

SEQ ID NO: 45514 - DNA, 22 bp, Artificial Sequence
  Probe
agttcgagcctcacctggagca

SEQ ID NO: 45515 - DNA, 24 bp, Artificial Sequence
  Probe
agttcgagcctcacctggagcatt

SEQ ID NO: 45516 - DNA, 25 bp, Artificial Sequence
  Probe
agttcgagcctcacctggagcattg

SEQ ID NO: 45517 - DNA, 22 bp, Artificial Sequence
  Probe
agttcgatcctcacacggggca

SEQ ID NO: 45518 - DNA, 24 bp, Artificial Sequence
  Probe
agttcgatcctcacacggggcaca

SEQ ID NO: 45519 - DNA, 25 bp, Artificial Sequence
  Probe
agttcgatcctcacacggggcacaa

SEQ ID NO: 45520 - DNA, 25 bp, Artificial Sequence
  Probe
agttgatgcagagtggggttttgca

SEQ ID NO: 45521 - DNA, 27 bp, Artificial Sequence
  Probe
agttgatgcagagtggggttttgcagt

SEQ ID NO: 45522 - DNA, 28 bp, Artificial Sequence
  Probe
agttgatgcagagtggggttttgcagtc

SEQ ID NO: 45523 - DNA, 30 bp, Artificial Sequence; identical to SEQ ID NO: 12788
  Probe

SEQ ID NO: 45524 - DNA, 34 bp, Artificial Sequence; identical to SEQ ID NO: 17016
  Probe

SEQ ID NO: 45525 - DNA, 35 bp, Artificial Sequence; identical to SEQ ID NO: 3616
  Probe

SEQ ID NO: 45526 - DNA, 23 bp, Artificial Sequence
  Probe
agttgattagggtgcttagctgt

SEQ ID NO: 45527 - DNA, 28 bp, Artificial Sequence
  Probe
agttgattagggtgcttagctgttaact

SEQ ID NO: 45528 - DNA, 29 bp, Artificial Sequence
  Probe
agttgattagggtgcttagctgttaacta

SEQ ID NO: 45529 - DNA, 44 bp, Artificial Sequence; identical to SEQ ID NO: 3617
  Probe

SEQ ID NO: 45530 - DNA, 35 bp, Artificial Sequence; identical to SEQ ID NO: 3620
  Probe

SEQ ID NO: 45531 - DNA, 37 bp, Artificial Sequence; identical to SEQ ID NO: 3621
  Probe

SEQ ID NO: 45532 - DNA, 27 bp, Artificial Sequence
  Probe
agttttgacaacattcaaaaaagagta

SEQ ID NO: 45533 - DNA, 29 bp, Artificial Sequence
  Probe
agttttgacaacattcaaaaaagagtaat

SEQ ID NO: 45534 - DNA, 42 bp, Artificial Sequence; identical to SEQ ID NO: 3622
  Probe

SEQ ID NO: 45535 - DNA, 50 bp, Artificial Sequence
  Probe
ataaaagagttactttgatagagtaaataataggagcttaaaccccctta

SEQ ID NO: 45536 - DNA, 30 bp, Artificial Sequence; identical to SEQ ID NO: 3625
  Probe

SEQ ID NO: 45537 - DNA, 19 bp, Artificial Sequence
  Probe
ataacagctatccattggt

SEQ ID NO: 45538 - DNA, 30 bp, Artificial Sequence; identical to SEQ ID NO: 28324
  Probe

SEQ ID NO: 45539 - DNA, 24 bp, Artificial Sequence
  Probe
ataaccatgcacactactataacc

SEQ ID NO: 45540 - DNA, 25 bp, Artificial Sequence
  Probe
ataaccatgcacactactataacca

SEQ ID NO: 45541 - DNA, 26 bp, Artificial Sequence
  Probe
ataaccatgcacactactataaccac

SEQ ID NO: 45542 - DNA, 27 bp, Artificial Sequence
  Probe
ataaccatgcacactactataaccacc

SEQ ID NO: 45543 - DNA, 28 bp, Artificial Sequence
  Probe
ataaccatgcacactactataaccaccc

SEQ ID NO: 45544 - DNA, 29 bp, Artificial Sequence
  Probe
ataaccatgcacactactataaccaccct

SEQ ID NO: 45545 - DNA, 30 bp, Artificial Sequence; identical to SEQ ID NO: 3631
  Probe

SEQ ID NO: 45546 - DNA, 42 bp, Artificial Sequence; identical to SEQ ID NO: 3634
  Probe

SEQ ID NO: 45547 - DNA, 24 bp, Artificial Sequence
  Probe
ataagctatcgggcccataccccg

SEQ ID NO: 45548 - DNA, 25 bp, Artificial Sequence
  Probe
ataagctatcgggcccataccccga

SEQ ID NO: 45549 - DNA, 26 bp, Artificial Sequence
  Probe
ataagctatcgggcccataccccgaa

SEQ ID NO: 45550 - DNA, 27 bp, Artificial Sequence
  Probe
ataagctatcgggcccataccccgaaa

SEQ ID NO: 45551 - DNA, 28 bp, Artificial Sequence
  Probe
ataagctatcgggcccataccccgaaaa

SEQ ID NO: 45552 - DNA, 29 bp, Artificial Sequence
  Probe
ataagctatcgggcccataccccgaaaat

SEQ ID NO: 45553 - DNA, 30 bp, Artificial Sequence; identical to SEQ ID NO: 3643
  Probe

SEQ ID NO: 45554 - DNA, 32 bp, Artificial Sequence; identical to SEQ ID NO: 3645
  Probe

SEQ ID NO: 45555 - DNA, 33 bp, Artificial Sequence; identical to SEQ ID NO: 3646
  Probe

SEQ ID NO: 45556 - DNA, 34 bp, Artificial Sequence; identical to SEQ ID NO: 3647
  Probe

SEQ ID NO: 45557 - DNA, 37 bp, Artificial Sequence; identical to SEQ ID NO: 3649
  Probe

SEQ ID NO: 45558 - DNA, 50 bp, Artificial Sequence; identical to SEQ ID NO: 3652
  Probe

SEQ ID NO: 45559 - DNA, 32 bp, Artificial Sequence
  Probe
ataataggagcttaaacccccttatttctagg

SEQ ID NO: 45560 - DNA, 20 bp, Artificial Sequence
  Probe
ataatcatatttaccaaatg

SEQ ID NO: 45561 - DNA, 31 bp, Artificial Sequence; identical to SEQ ID NO: 17084
  Probe

SEQ ID NO: 45562 - DNA, 42 bp, Artificial Sequence; identical to SEQ ID NO: 17085
  Probe

SEQ ID NO: 45563 - DNA, 50 bp, Artificial Sequence; identical to SEQ ID NO: 28366
  Probe

SEQ ID NO: 45564 - DNA, 50 bp, Artificial Sequence; identical to SEQ ID NO: 3654
  Probe

SEQ ID NO: 45565 - DNA, 46 bp, Artificial Sequence; identical to SEQ ID NO: 3655
  Probe

SEQ ID NO: 45566 - DNA, 50 bp, Artificial Sequence; identical to SEQ ID NO: 3657
  Probe

SEQ ID NO: 45567 - DNA, 29 bp, Artificial Sequence
  Probe
atacccacacccacccaagaacagggttt

SEQ ID NO: 45568 - DNA, 30 bp, Artificial Sequence; identical to SEQ ID NO: 3660
  Probe

SEQ ID NO: 45569 - DNA, 31 bp, Artificial Sequence; identical to SEQ ID NO: 3661
  Probe

SEQ ID NO: 45570 - DNA, 32 bp, Artificial Sequence; identical to SEQ ID NO: 3662
  Probe

SEQ ID NO: 45571 - DNA, 33 bp, Artificial Sequence; identical to SEQ ID NO: 3663
  Probe

SEQ ID NO: 45572 - DNA, 36 bp, Artificial Sequence; identical to SEQ ID NO: 17096
  Probe

SEQ ID NO: 45573 - DNA, 31 bp, Artificial Sequence
  Probe
ataccccgaaaatgttggttatacccttccc

SEQ ID NO: 45574 - DNA, 34 bp, Artificial Sequence; identical to SEQ ID NO: 3665
  Probe

SEQ ID NO: 45575 - DNA, 37 bp, Artificial Sequence; identical to SEQ ID NO: 12794
  Probe

SEQ ID NO: 45576 - DNA, 39 bp, Artificial Sequence; identical to SEQ ID NO: 3666
  Probe

SEQ ID NO: 45577 - DNA, 40 bp, Artificial Sequence; identical to SEQ ID NO: 3667
  Probe

SEQ ID NO: 45578 - DNA, 18 bp, Artificial Sequence
  Probe
atagagtaaataatagga

SEQ ID NO: 45579 - DNA, 19 bp, Artificial Sequence
  Probe
atagagtaaataataggag

SEQ ID NO: 45580 - DNA, 28 bp, Artificial Sequence
  Probe
atagagtaaataataggagcttaaaccc

SEQ ID NO: 45581 - DNA, 29 bp, Artificial Sequence
  Probe
atagagtaaataataggagcttaaacccc

SEQ ID NO: 45582 - DNA, 31 bp, Artificial Sequence
  Probe
atagagtaaataataggagcttaaaccccct

SEQ ID NO: 45583 - DNA, 34 bp, Artificial Sequence; identical to SEQ ID NO: 369
  Probe

SEQ ID NO: 45584 - DNA, 35 bp, Artificial Sequence
  Probe
atagagtaaataataggagcttaaacccccttatt

SEQ ID NO: 45585 - DNA, 37 bp, Artificial Sequence; identical to SEQ ID NO: 3668
  Probe

SEQ ID NO: 45586 - DNA, 38 bp, Artificial Sequence; identical to SEQ ID NO: 370
  Probe

SEQ ID NO: 45587 - DNA, 40 bp, Artificial Sequence; identical to SEQ ID NO: 3669
  Probe

SEQ ID NO: 45588 - DNA, 41 bp, Artificial Sequence; identical to SEQ ID NO: 3670
  Probe

SEQ ID NO: 45589 - DNA, 42 bp, Artificial Sequence; identical to SEQ ID NO: 3671
  Probe

SEQ ID NO: 45590 - DNA, 43 bp, Artificial Sequence; identical to SEQ ID NO: 3672
  Probe

SEQ ID NO: 45591 - DNA, 44 bp, Artificial Sequence
  Probe
atagagtaaataataggagcttaaacccccttatttctaggact

SEQ ID NO: 45592 - DNA, 27 bp, Artificial Sequence
  Probe
atagctcagtcggtagagcatcagact

SEQ ID NO: 45593 - DNA, 30 bp, Artificial Sequence; identical to SEQ ID NO: 12797
  Probe

SEQ ID NO: 45594 - DNA, 17 bp, Artificial Sequence
  Probe
ataggagcttaaacccc

SEQ ID NO: 45595 - DNA, 18 bp, Artificial Sequence
  Probe
ataggagcttaaaccccc

SEQ ID NO: 45596 - DNA, 27 bp, Artificial Sequence
  Probe
ataggctaaatcctatatatcttaatg

SEQ ID NO: 45597 - DNA, 16 bp, Artificial Sequence
  Probe
ataggtggcacggaga

SEQ ID NO: 45598 - DNA, 17 bp, Artificial Sequence
  Probe
ataggtggcacggagaa

SEQ ID NO: 45599 - DNA, 17 bp, Artificial Sequence
  Probe
ataggtttggtcctagc

SEQ ID NO: 45600 - DNA, 18 bp, Artificial Sequence
  Probe
ataggtttggtcctagcc

SEQ ID NO: 45601 - DNA, 19 bp, Artificial Sequence
  Probe
ataggtttggtcctagcct

SEQ ID NO: 45602 - DNA, 20 bp, Artificial Sequence
  Probe
ataggtttggtcctagcctt

SEQ ID NO: 45603 - DNA, 22 bp, Artificial Sequence
  Probe
ataggtttggtcctagcctttc

SEQ ID NO: 45604 - DNA, 23 bp, Artificial Sequence
  Probe
ataggtttggtcctagcctttct

SEQ ID NO: 45605 - DNA, 24 bp, Artificial Sequence
  Probe
ataggtttggtcctagcctttcta

SEQ ID NO: 45606 - DNA, 26 bp, Artificial Sequence
  Probe
ataggtttggtcctagcctttctatt

SEQ ID NO: 45607 - DNA, 27 bp, Artificial Sequence
  Probe
ataggtttggtcctagcctttctatta

SEQ ID NO: 45608 - DNA, 29 bp, Artificial Sequence
  Probe
ataggtttggtcctagcctttctattagc

SEQ ID NO: 45609 - DNA, 50 bp, Artificial Sequence; identical to SEQ ID NO: 3687
  Probe

SEQ ID NO: 45610 - DNA, 23 bp, Artificial Sequence
  Probe
atatcattggtcgtggttgtagt

SEQ ID NO: 45611 - DNA, 25 bp, Artificial Sequence
  Probe
atatcattggtcgtggttgtagtcc

SEQ ID NO: 45612 - DNA, 31 bp, Artificial Sequence; identical to SEQ ID NO: 25026
  Probe

SEQ ID NO: 45613 - DNA, 35 bp, Artificial Sequence; identical to SEQ ID NO: 12801
  Probe

SEQ ID NO: 45614 - DNA, 36 bp, Artificial Sequence; identical to SEQ ID NO: 372
  Probe

SEQ ID NO: 45615 - DNA, 37 bp, Artificial Sequence; identical to SEQ ID NO: 17141
  Probe

SEQ ID NO: 45616 - DNA, 38 bp, Artificial Sequence; identical to SEQ ID NO: 17142
  Probe

SEQ ID NO: 45617 - DNA, 39 bp, Artificial Sequence; identical to SEQ ID NO: 3695
  Probe

SEQ ID NO: 45618 - DNA, 23 bp, Artificial Sequence
  Probe
atatccaaccttcagctataggg

SEQ ID NO: 45619 - DNA, 29 bp, Artificial Sequence
  Probe
atatccaaccttcagctatagggtggaga

SEQ ID NO: 45620 - DNA, 50 bp, Artificial Sequence; identical to SEQ ID NO: 3698
  Probe

SEQ ID NO: 45621 - DNA, 18 bp, Artificial Sequence
  Probe
atcaccccataaacaaat

SEQ ID NO: 45622 - DNA, 50 bp, Artificial Sequence
  Probe
atcacgtctgctttacacgcagaaggtcctgggttcgagccccagtggaa

SEQ ID NO: 45623 - DNA, 32 bp, Artificial Sequence
  Probe
atcacgttcgcctaacacgcgaaaggtccccg

SEQ ID NO: 45624 - DNA, 50 bp, Artificial Sequence
  Probe
atcacgttcgcctaacacgcgaaaggtccccggttcgaaaccgggcggaa

SEQ ID NO: 45625 - DNA, 25 bp, Artificial Sequence
  Probe
atcacgttcgcctcacacgcgaaag

SEQ ID NO: 45626 - DNA, 32 bp, Artificial Sequence
  Probe
atcacgttcgcctcacacgcgaaaggtccccg

SEQ ID NO: 45627 - DNA, 44 bp, Artificial Sequence
  Probe
atcacgttcgcctcacacgcgaaaggtccccggttcgaaaccgg

SEQ ID NO: 45628 - DNA, 50 bp, Artificial Sequence
  Probe
atcacgttcgcctcacacgcgaaaggtccccggttcgaaaccgggcggaa

SEQ ID NO: 45629 - DNA, 34 bp, Artificial Sequence; identical to SEQ ID NO: 374
  Probe

SEQ ID NO: 45630 - DNA, 36 bp, Artificial Sequence; identical to SEQ ID NO: 17155
  Probe

SEQ ID NO: 45631 - DNA, 34 bp, Artificial Sequence; identical to SEQ ID NO: 375
  Probe

SEQ ID NO: 45632 - DNA, 36 bp, Artificial Sequence; identical to SEQ ID NO: 17166
  Probe

SEQ ID NO: 45633 - DNA, 50 bp, Artificial Sequence; identical to SEQ ID NO: 3714
  Probe

SEQ ID NO: 45634 - DNA, 50 bp, Artificial Sequence; identical to SEQ ID NO: 3715
  Probe

SEQ ID NO: 45635 - DNA, 20 bp, Artificial Sequence
  Probe
atcattggtcgtggttgtag

SEQ ID NO: 45636 - DNA, 28 bp, Artificial Sequence
  Probe
atcattggtcgtggttgtagtccgtgcg

SEQ ID NO: 45637 - DNA, 31 bp, Artificial Sequence; identical to SEQ ID NO: 17185
  Probe

SEQ ID NO: 45638 - DNA, 36 bp, Artificial Sequence; identical to SEQ ID NO: 17195
  Probe

SEQ ID NO: 45639 - DNA, 37 bp, Artificial Sequence; identical to SEQ ID NO: 3722
  Probe

SEQ ID NO: 45640 - DNA, 38 bp, Artificial Sequence; identical to SEQ ID NO: 3723
  Probe

SEQ ID NO: 45641 - DNA, 36 bp, Artificial Sequence; identical to SEQ ID NO: 17198
  Probe

SEQ ID NO: 45642 - DNA, 34 bp, Artificial Sequence; identical to SEQ ID NO: 17199
  Probe

SEQ ID NO: 45643 - DNA, 36 bp, Artificial Sequence; identical to SEQ ID NO: 17201
  Probe

SEQ ID NO: 45644 - DNA, 38 bp, Artificial Sequence; identical to SEQ ID NO: 3724
  Probe

SEQ ID NO: 45645 - DNA, 18 bp, Artificial Sequence
  Probe
atccaggtgccccctccc

SEQ ID NO: 45646 - DNA, 23 bp, Artificial Sequence
  Probe
atccattggggtttccccgcgca

SEQ ID NO: 45647 - DNA, 26 bp, Artificial Sequence
  Probe
atccattggtcttaggccccaaaaat

SEQ ID NO: 45648 - DNA, 45 bp, Artificial Sequence; identical to SEQ ID NO: 3727
  Probe

SEQ ID NO: 45649 - DNA, 49 bp, Artificial Sequence; identical to SEQ ID NO: 3728
  Probe

SEQ ID NO: 45650 - DNA, 50 bp, Artificial Sequence; identical to SEQ ID NO: 28512
  Probe

SEQ ID NO: 45651 - DNA, 18 bp, Artificial Sequence
  Probe
atcccaccgctgccaagt

SEQ ID NO: 45652 - DNA, 21 bp, Artificial Sequence
  Probe
atcccaccgctgccaagtact

SEQ ID NO: 45653 - DNA, 17 bp, Artificial Sequence
  Probe
atcccaccgctgccaca

SEQ ID NO: 45654 - DNA, 18 bp, Artificial Sequence
  Probe
atcccaccgctgccacac

SEQ ID NO: 45655 - DNA, 19 bp, Artificial Sequence
  Probe
atcccaccgctgccacacc

SEQ ID NO: 45656 - DNA, 20 bp, Artificial Sequence
  Probe
atcccaccgctgccacacct

SEQ ID NO: 45657 - DNA, 21 bp, Artificial Sequence
  Probe
atcccaccgctgccacacctc

SEQ ID NO: 45658 - DNA, 22 bp, Artificial Sequence
  Probe
atcccaccgctgccacacctca

SEQ ID NO: 45659 - DNA, 18 bp, Artificial Sequence
  Probe
atcccaccgctgccaggt

SEQ ID NO: 45660 - DNA, 20 bp, Artificial Sequence
  Probe
atcccaccgctgccaggtgc

SEQ ID NO: 45661 - DNA, 23 bp, Artificial Sequence
  Probe
atcccaccgctgccaggtgcttc

SEQ ID NO: 45662 - DNA, 24 bp, Artificial Sequence
  Probe
atcccaccgctgccaggtgcttcc

SEQ ID NO: 45663 - DNA, 20 bp, Artificial Sequence
  Probe
atcccaccgctgccaggttt

SEQ ID NO: 45664 - DNA, 21 bp, Artificial Sequence
  Probe
atcccaccgctgccaggttta

SEQ ID NO: 45665 - DNA, 22 bp, Artificial Sequence
  Probe
atcccaccgctgccaggtttat

SEQ ID NO: 45666 - DNA, 18 bp, Artificial Sequence
  Probe
atcccactcctgacaagc

SEQ ID NO: 45667 - DNA, 18 bp, Artificial Sequence
  Probe
atcccagcggtgcctccg

SEQ ID NO: 45668 - DNA, 34 bp, Artificial Sequence; identical to SEQ ID NO: 17246
  Probe

SEQ ID NO: 45669 - DNA, 17 bp, Artificial Sequence
  Probe
atcccatcctcgtcgct

SEQ ID NO: 45670 - DNA, 20 bp, Artificial Sequence
  Probe
atcccatcctcgtcgctcgg

SEQ ID NO: 45671 - DNA, 18 bp, Artificial Sequence
  Probe
atccccggcacctccacc

SEQ ID NO: 45672 - DNA, 18 bp, Artificial Sequence
  Probe
atccccggcatctccaaa

SEQ ID NO: 45673 - DNA, 18 bp, Artificial Sequence
  Probe
atccccggcatctccatt

SEQ ID NO: 45674 - DNA, 19 bp, Artificial Sequence
  Probe
atccccggcatctccattg

SEQ ID NO: 45675 - DNA, 16 bp, Artificial Sequence
  Probe
atcccggacgagcccc

SEQ ID NO: 45676 - DNA, 17 bp, Artificial Sequence
  Probe
atcccggacgagccccc

SEQ ID NO: 45677 - DNA, 18 bp, Artificial Sequence
  Probe
atcccggacgagccccct

SEQ ID NO: 45678 - DNA, 20 bp, Artificial Sequence
  Probe
atcccggacgagcccccttt

SEQ ID NO: 45679 - DNA, 17 bp, Artificial Sequence
  Probe
atcccggacgagcccct

SEQ ID NO: 45680 - DNA, 17 bp, Artificial Sequence
  Probe
atccggctcgaaggacg

SEQ ID NO: 45681 - DNA, 18 bp, Artificial Sequence
  Probe
atccggctcgaaggacga

SEQ ID NO: 45682 - DNA, 16 bp, Artificial Sequence
  Probe
atccgggtgccccctc

SEQ ID NO: 45683 - DNA, 17 bp, Artificial Sequence
  Probe
atccgggtgccccctca

SEQ ID NO: 45684 - DNA, 18 bp, Artificial Sequence
  Probe
atccgggtgccccctcaa

SEQ ID NO: 45685 - DNA, 19 bp, Artificial Sequence
  Probe
atccgggtgccccctcaat

SEQ ID NO: 45686 - DNA, 20 bp, Artificial Sequence
  Probe
atccgggtgccccctcaatg

SEQ ID NO: 45687 - DNA, 21 bp, Artificial Sequence
  Probe
atccgggtgccccctcaatgg

SEQ ID NO: 45688 - DNA, 22 bp, Artificial Sequence
  Probe
atccgggtgccccctcaatggc

SEQ ID NO: 45689 - DNA, 18 bp, Artificial Sequence
  Probe
atccgggtgccccctcac

SEQ ID NO: 45690 - DNA, 20 bp, Artificial Sequence
  Probe
atccgggtgccccctcacag

SEQ ID NO: 45691 - DNA, 17 bp, Artificial Sequence
  Probe
atccgggtgccccctcg

SEQ ID NO: 45692 - DNA, 17 bp, Artificial Sequence
  Probe
atccgggtgccccctct

SEQ ID NO: 45693 - DNA, 18 bp, Artificial Sequence
  Probe
atccgggtgccccctctg

SEQ ID NO: 45694 - DNA, 19 bp, Artificial Sequence
  Probe
atccgggtgccccctctgt

SEQ ID NO: 45695 - DNA, 20 bp, Artificial Sequence
  Probe
atccgggtgccccctctgtg

SEQ ID NO: 45696 - DNA, 21 bp, Artificial Sequence
  Probe
atccgggtgccccctctgtgc

SEQ ID NO: 45697 - DNA, 19 bp, Artificial Sequence
  Probe
atcctcacacggggcacaa

SEQ ID NO: 45698 - DNA, 31 bp, Artificial Sequence; identical to SEQ ID NO: 17303
  Probe

SEQ ID NO: 45699 - DNA, 50 bp, Artificial Sequence; identical to SEQ ID NO: 17308
  Probe

SEQ ID NO: 45700 - DNA, 50 bp, Artificial Sequence; identical to SEQ ID NO: 38575
  Probe

SEQ ID NO: 45701 - DNA, 23 bp, Artificial Sequence
  Probe
atcgaaaccatcctctgctaggt

SEQ ID NO: 45702 - DNA, 22 bp, Artificial Sequence
  Probe
atcgaaaccatcctctgctatc

SEQ ID NO: 45703 - DNA, 23 bp, Artificial Sequence
  Probe
atcgatgcccgcatcctccactc

SEQ ID NO: 45704 - DNA, 23 bp, Artificial Sequence
  Probe
atcgatgcccgcattctccatac

SEQ ID NO: 45705 - DNA, 20 bp, Artificial Sequence
  Probe
atcgcataaaacttaaaact

SEQ ID NO: 45706 - DNA, 25 bp, Artificial Sequence
  Probe
atcgcataaaacttaaaactttaca

SEQ ID NO: 45707 - DNA, 32 bp, Artificial Sequence
  Probe
atcgcataaaacttaaaactttacagtcagag

SEQ ID NO: 45708 - DNA, 37 bp, Artificial Sequence
  Probe
atcgcataaaacttaaaactttacagtcagaggttca

SEQ ID NO: 45709 - DNA, 49 bp, Artificial Sequence; identical to SEQ ID NO: 3758
  Probe

SEQ ID NO: 45710 - DNA, 50 bp, Artificial Sequence; identical to SEQ ID NO: 3759
  Probe

SEQ ID NO: 45711 - DNA, 24 bp, Artificial Sequence
  Probe
atcggtgcatgggtggttcagtgg

SEQ ID NO: 45712 - DNA, 26 bp, Artificial Sequence
  Probe
atcggtgcatgggtggttcagtggta

SEQ ID NO: 45713 - DNA, 28 bp, Artificial Sequence
  Probe
atcggtgcatgggtggttcagtggtaga

SEQ ID NO: 45714 - DNA, 35 bp, Artificial Sequence; identical to SEQ ID NO: 17338
  Probe

SEQ ID NO: 45715 - DNA, 50 bp, Artificial Sequence; identical to SEQ ID NO: 38591
  Probe

SEQ ID NO: 45716 - DNA, 29 bp, Artificial Sequence
  Probe
atcgtatagtggttagtactctgcgttgt

SEQ ID NO: 45717 - DNA, 27 bp, Artificial Sequence
  Probe
atctaaagacaggggttaggcctcttt

SEQ ID NO: 45718 - DNA, 28 bp, Artificial Sequence
  Probe
atctaaagacaggggttaggcctctttt

SEQ ID NO: 45719 - DNA, 34 bp, Artificial Sequence; identical to SEQ ID NO: 17345
  Probe

SEQ ID NO: 45720 - DNA, 35 bp, Artificial Sequence; identical to SEQ ID NO: 3765
  Probe

SEQ ID NO: 45721 - DNA, 36 bp, Artificial Sequence; identical to SEQ ID NO: 3766
  Probe

SEQ ID NO: 45722 - DNA, 38 bp, Artificial Sequence; identical to SEQ ID NO: 17349
  Probe

SEQ ID NO: 45723 - DNA, 36 bp, Artificial Sequence
  Probe
atctaaaggtccctggttcaatcccgggtttcggca

SEQ ID NO: 45724 - DNA, 38 bp, Artificial Sequence
  Probe
atctaaaggtccctggttcaatcccgggtttcggcagc

SEQ ID NO: 45725 - DNA, 39 bp, Artificial Sequence; identical to SEQ ID NO: 3770
  Probe

SEQ ID NO: 45726 - DNA, 20 bp, Artificial Sequence
  Probe
atctaaaggtccctggttcg

SEQ ID NO: 45727 - DNA, 21 bp, Artificial Sequence
  Probe
atctaaaggtccctggttcga

SEQ ID NO: 45728 - DNA, 23 bp, Artificial Sequence
  Probe
atctaaaggtccctggttcgatc

SEQ ID NO: 45729 - DNA, 35 bp, Artificial Sequence
  Probe
atctaaaggtccctggttcgatcccgggtttcggc

SEQ ID NO: 45730 - DNA, 38 bp, Artificial Sequence; identical to SEQ ID NO: 3773
  Probe

SEQ ID NO: 45731 - DNA, 39 bp, Artificial Sequence; identical to SEQ ID NO: 3774
  Probe

SEQ ID NO: 45732 - DNA, 39 bp, Artificial Sequence; identical to SEQ ID NO: 3775
  Probe

SEQ ID NO: 45733 - DNA, 39 bp, Artificial Sequence; identical to SEQ ID NO: 3776
  Probe

SEQ ID NO: 45734 - DNA, 39 bp, Artificial Sequence; identical to SEQ ID NO: 3777
  Probe

SEQ ID NO: 45735 - DNA, 39 bp, Artificial Sequence; identical to SEQ ID NO: 3780
  Probe

SEQ ID NO: 45736 - DNA, 36 bp, Artificial Sequence; identical to SEQ ID NO: 28719
  Probe

SEQ ID NO: 45737 - DNA, 39 bp, Artificial Sequence; identical to SEQ ID NO: 3783
  Probe

SEQ ID NO: 45738 - DNA, 35 bp, Artificial Sequence; identical to SEQ ID NO: 399
  Probe

SEQ ID NO: 45739 - DNA, 36 bp, Artificial Sequence; identical to SEQ ID NO: 3790
  Probe

SEQ ID NO: 45740 - DNA, 38 bp, Artificial Sequence; identical to SEQ ID NO: 3792
  Probe

SEQ ID NO: 45741 - DNA, 34 bp, Artificial Sequence; identical to SEQ ID NO: 17371
  Probe

SEQ ID NO: 45742 - DNA, 36 bp, Artificial Sequence; identical to SEQ ID NO: 25049
  Probe

SEQ ID NO: 45743 - DNA, 39 bp, Artificial Sequence; identical to SEQ ID NO: 3794
  Probe

SEQ ID NO: 45744 - DNA, 49 bp, Artificial Sequence; identical to SEQ ID NO: 3796
  Probe

SEQ ID NO: 45745 - DNA, 50 bp, Artificial Sequence; identical to SEQ ID NO: 3797
  Probe

SEQ ID NO: 45746 - DNA, 25 bp, Artificial Sequence
  Probe
atgaaaacctttttccaaggacaaa

SEQ ID NO: 45747 - DNA, 26 bp, Artificial Sequence
  Probe
atgaaaacctttttccaaggacaaat

SEQ ID NO: 45748 - DNA, 36 bp, Artificial Sequence; identical to SEQ ID NO: 17382
  Probe

SEQ ID NO: 45749 - DNA, 23 bp, Artificial Sequence
  Probe
atgataatcatatttaccaaatg

SEQ ID NO: 45750 - DNA, 30 bp, Artificial Sequence; identical to SEQ ID NO: 17384
  Probe

SEQ ID NO: 45751 - DNA, 44 bp, Artificial Sequence; identical to SEQ ID NO: 3805
  Probe

SEQ ID NO: 45752 - DNA, 24 bp, Artificial Sequence
  Probe
atgcacactactataaccacccta

SEQ ID NO: 45753 - DNA, 18 bp, Artificial Sequence
  Probe
atgcagagtggggttttg

SEQ ID NO: 45754 - DNA, 20 bp, Artificial Sequence
  Probe
atgcagagtggggttttgca

SEQ ID NO: 45755 - DNA, 23 bp, Artificial Sequence
  Probe
atgcagagtggggttttgcagtc

SEQ ID NO: 45756 - DNA, 28 bp, Artificial Sequence
  Probe
atgcagagtggggttttgcagtccttag

SEQ ID NO: 45757 - DNA, 30 bp, Artificial Sequence; identical to SEQ ID NO: 3807
  Probe

SEQ ID NO: 45758 - DNA, 19 bp, Artificial Sequence
  Probe
atgccccaactaaatacta

SEQ ID NO: 45759 - DNA, 21 bp, Artificial Sequence
  Probe
atgccccaactaaatactacc

SEQ ID NO: 45760 - DNA, 22 bp, Artificial Sequence
  Probe
atgccccaactaaatactaccg

SEQ ID NO: 45761 - DNA, 23 bp, Artificial Sequence
  Probe
atgccccaactaaatactaccgt

SEQ ID NO: 45762 - DNA, 24 bp, Artificial Sequence
  Probe
atgccccaactaaatactaccgta

SEQ ID NO: 45763 - DNA, 26 bp, Artificial Sequence
  Probe
atgccccaactaaatactaccgtatg

SEQ ID NO: 45764 - DNA, 28 bp, Artificial Sequence
  Probe
atgccccaactaaatactaccgtatggc

SEQ ID NO: 45765 - DNA, 18 bp, Artificial Sequence
  Probe
atgcccccatgtctaaca

SEQ ID NO: 45766 - DNA, 19 bp, Artificial Sequence
  Probe
atgcccccatgtctaacaa

SEQ ID NO: 45767 - DNA, 21 bp, Artificial Sequence
  Probe
atgcccccatgtctaacaaca

SEQ ID NO: 45768 - DNA, 26 bp, Artificial Sequence
  Probe
atgcccccatgtctaacaacatggct

SEQ ID NO: 45769 - DNA, 27 bp, Artificial Sequence
  Probe
atgcccccatgtctaacaacatggctt

SEQ ID NO: 45770 - DNA, 28 bp, Artificial Sequence
  Probe
atgcccccatgtctaacaacatggcttt

SEQ ID NO: 45771 - DNA, 29 bp, Artificial Sequence
  Probe
atgcccccatgtctaacaacatggctttc

SEQ ID NO: 45772 - DNA, 30 bp, Artificial Sequence; identical to SEQ ID NO: 3818
  Probe

SEQ ID NO: 45773 - DNA, 31 bp, Artificial Sequence; identical to SEQ ID NO: 3819
  Probe

SEQ ID NO: 45774 - DNA, 32 bp, Artificial Sequence; identical to SEQ ID NO: 3820
  Probe

SEQ ID NO: 45775 - DNA, 33 bp, Artificial Sequence; identical to SEQ ID NO: 3821
  Probe

SEQ ID NO: 45776 - DNA, 34 bp, Artificial Sequence; identical to SEQ ID NO: 3822
  Probe

SEQ ID NO: 45777 - DNA, 35 bp, Artificial Sequence; identical to SEQ ID NO: 3823
  Probe

SEQ ID NO: 45778 - DNA, 16 bp, Artificial Sequence
  Probe
atgcccctcatttaca

SEQ ID NO: 45779 - DNA, 18 bp, Artificial Sequence
  Probe
atgcccctcatttacata

SEQ ID NO: 45780 - DNA, 21 bp, Artificial Sequence
  Probe
atgcccctcatttacataaat

SEQ ID NO: 45781 - DNA, 22 bp, Artificial Sequence
  Probe
atgcccctcatttacataaata

SEQ ID NO: 45782 - DNA, 27 bp, Artificial Sequence
  Probe
atgcccctcatttacataaatattata

SEQ ID NO: 45783 - DNA, 29 bp, Artificial Sequence
  Probe
atgcccctcatttacataaatattatact

SEQ ID NO: 45784 - DNA, 30 bp, Artificial Sequence; identical to SEQ ID NO: 3825
  Probe

SEQ ID NO: 45785 - DNA, 32 bp, Artificial Sequence
  Probe
atgccgaggttgtgagttcgagcctcacctgg

SEQ ID NO: 45786 - DNA, 36 bp, Artificial Sequence; identical to SEQ ID NO: 17435
  Probe

SEQ ID NO: 45787 - DNA, 45 bp, Artificial Sequence; identical to SEQ ID NO: 17436
  Probe

SEQ ID NO: 45788 - DNA, 27 bp, Artificial Sequence
  Probe
atggatcgaaaccatcctctgctaggt

SEQ ID NO: 45789 - DNA, 16 bp, Artificial Sequence
  Probe
atggcacatgcagcgc

SEQ ID NO: 45790 - DNA, 17 bp, Artificial Sequence
  Probe
atggcacatgcagcgca

SEQ ID NO: 45791 - DNA, 18 bp, Artificial Sequence
  Probe
atggcacatgcagcgcaa

SEQ ID NO: 45792 - DNA, 19 bp, Artificial Sequence
  Probe
atggcacatgcagcgcaag

SEQ ID NO: 45793 - DNA, 20 bp, Artificial Sequence
  Probe
atggcacatgcagcgcaagt

SEQ ID NO: 45794 - DNA, 21 bp, Artificial Sequence
  Probe
atggcacatgcagcgcaagta

SEQ ID NO: 45795 - DNA, 22 bp, Artificial Sequence
  Probe
atggcacatgcagcgcaagtag

SEQ ID NO: 45796 - DNA, 23 bp, Artificial Sequence
  Probe
atggcacatgcagcgcaagtagg

SEQ ID NO: 45797 - DNA, 24 bp, Artificial Sequence
  Probe
atggcacatgcagcgcaagtaggt

SEQ ID NO: 45798 - DNA, 25 bp, Artificial Sequence
  Probe
atggcacatgcagcgcaagtaggtc

SEQ ID NO: 45799 - DNA, 26 bp, Artificial Sequence
  Probe
atggcacatgcagcgcaagtaggtct

SEQ ID NO: 45800 - DNA, 27 bp, Artificial Sequence
  Probe
atggcacatgcagcgcaagtaggtcta

SEQ ID NO: 45801 - DNA, 28 bp, Artificial Sequence
  Probe
atggcacatgcagcgcaagtaggtctac

SEQ ID NO: 45802 - DNA, 29 bp, Artificial Sequence
  Probe
atggcacatgcagcgcaagtaggtctaca

SEQ ID NO: 45803 - DNA, 30 bp, Artificial Sequence; identical to SEQ ID NO: 3841
  Probe

SEQ ID NO: 45804 - DNA, 22 bp, Artificial Sequence
  Probe
atggccaacctcctactcctca

SEQ ID NO: 45805 - DNA, 25 bp, Artificial Sequence
  Probe
atggggtgtgataggtggcacggag

SEQ ID NO: 45806 - DNA, 46 bp, Artificial Sequence
  Probe
atggggttggcttgaaaccagctttggggggttcgattccttcctt

SEQ ID NO: 45807 - DNA, 30 bp, Artificial Sequence; identical to SEQ ID NO: 3846
  Probe

SEQ ID NO: 45808 - DNA, 31 bp, Artificial Sequence; identical to SEQ ID NO: 3847
  Probe

SEQ ID NO: 45809 - DNA, 35 bp, Artificial Sequence; identical to SEQ ID NO: 3849
  Probe

SEQ ID NO: 45810 - DNA, 33 bp, Artificial Sequence; identical to SEQ ID NO: 28914
  Probe

SEQ ID NO: 45811 - DNA, 38 bp, Artificial Sequence
  Probe
atggtttttcatatcattggtcgtggttgtagtccgtg

SEQ ID NO: 45812 - DNA, 25 bp, Artificial Sequence
  Probe
atgtcgttagtctaggctgtcagct

SEQ ID NO: 45813 - DNA, 18 bp, Artificial Sequence
  Probe
atgtctaacaacatggct

SEQ ID NO: 45814 - DNA, 24 bp, Artificial Sequence
  Probe
atgtctaacaacatggctttctca

SEQ ID NO: 45815 - DNA, 26 bp, Artificial Sequence
  Probe
atgtctaacaacatggctttctcaac

SEQ ID NO: 45816 - DNA, 27 bp, Artificial Sequence
  Probe
atgtctaacaacatggctttctcaact

SEQ ID NO: 45817 - DNA, 26 bp, Artificial Sequence
  Probe
atgttggttatacccttcccgtacta

SEQ ID NO: 45818 - DNA, 17 bp, Artificial Sequence
  Probe
atgtttagacgggctca

SEQ ID NO: 45819 - DNA, 18 bp, Artificial Sequence
  Probe
atgtttagacgggctcac

SEQ ID NO: 45820 - DNA, 22 bp, Artificial Sequence
  Probe
atgtttagacgggctcacatca

SEQ ID NO: 45821 - DNA, 29 bp, Artificial Sequence
  Probe
atgtttagacgggctcacatcaccccata

SEQ ID NO: 45822 - DNA, 30 bp, Artificial Sequence; identical to SEQ ID NO: 419
  Probe

SEQ ID NO: 45823 - DNA, 33 bp, Artificial Sequence; identical to SEQ ID NO: 3865
  Probe

SEQ ID NO: 45824 - DNA, 34 bp, Artificial Sequence
  Probe
atgtttagacgggctcacatcaccccataaacaa

SEQ ID NO: 45825 - DNA, 35 bp, Artificial Sequence; identical to SEQ ID NO: 3866
  Probe

SEQ ID NO: 45826 - DNA, 36 bp, Artificial Sequence; identical to SEQ ID NO: 3867
  Probe

SEQ ID NO: 45827 - DNA, 37 bp, Artificial Sequence; identical to SEQ ID NO: 3868
  Probe

SEQ ID NO: 45828 - DNA, 38 bp, Artificial Sequence; identical to SEQ ID NO: 3869
  Probe

SEQ ID NO: 45829 - DNA, 50 bp, Artificial Sequence; identical to SEQ ID NO: 3870
  Probe

SEQ ID NO: 45830 - DNA, 31 bp, Artificial Sequence; identical to SEQ ID NO: 17497
  Probe

SEQ ID NO: 45831 - DNA, 32 bp, Artificial Sequence; identical to SEQ ID NO: 12838
  Probe

SEQ ID NO: 45832 - DNA, 33 bp, Artificial Sequence; identical to SEQ ID NO: 3873
  Probe

SEQ ID NO: 45833 - DNA, 22 bp, Artificial Sequence
  Probe
attaatcccctggcccaacccg

SEQ ID NO: 45834 - DNA, 30 bp, Artificial Sequence; identical to SEQ ID NO: 3877
  Probe

SEQ ID NO: 45835 - DNA, 32 bp, Artificial Sequence
  Probe
attagaatcttagctttgggtgctaatggtgg

SEQ ID NO: 45836 - DNA, 50 bp, Artificial Sequence; identical to SEQ ID NO: 420
  Probe

SEQ ID NO: 45837 - DNA, 50 bp, Artificial Sequence; identical to SEQ ID NO: 421
  Probe

SEQ ID NO: 45838 - DNA, 26 bp, Artificial Sequence
  Probe
attccaggttcgactcctggctggct

SEQ ID NO: 45839 - DNA, 45 bp, Artificial Sequence; identical to SEQ ID NO: 17522
  Probe

SEQ ID NO: 45840 - DNA, 50 bp, Artificial Sequence; identical to SEQ ID NO: 38673
  Probe

SEQ ID NO: 45841 - DNA, 19 bp, Artificial Sequence
  Probe
attcccggtcagggaacca

SEQ ID NO: 45842 - DNA, 49 bp, Artificial Sequence; identical to SEQ ID NO: 3881
  Probe

SEQ ID NO: 45843 - DNA, 50 bp, Artificial Sequence; identical to SEQ ID NO: 3882
  Probe

SEQ ID NO: 45844 - DNA, 50 bp, Artificial Sequence; identical to SEQ ID NO: 3883
  Probe

SEQ ID NO: 45845 - DNA, 50 bp, Artificial Sequence; identical to SEQ ID NO: 38687
  Probe

SEQ ID NO: 45846 - DNA, 31 bp, Artificial Sequence; identical to SEQ ID NO: 3884
  Probe

SEQ ID NO: 45847 - DNA, 32 bp, Artificial Sequence; identical to SEQ ID NO: 29006
  Probe

SEQ ID NO: 45848 - DNA, 33 bp, Artificial Sequence; identical to SEQ ID NO: 3885
  Probe

SEQ ID NO: 45849 - DNA, 36 bp, Artificial Sequence; identical to SEQ ID NO: 3887
  Probe

SEQ ID NO: 45850 - DNA, 37 bp, Artificial Sequence; identical to SEQ ID NO: 3888
  Probe

SEQ ID NO: 45851 - DNA, 26 bp, Artificial Sequence
  Probe
attctaggttcgactcctggctggct

SEQ ID NO: 45852 - DNA, 33 bp, Artificial Sequence; identical to SEQ ID NO: 29023
  Probe

SEQ ID NO: 45853 - DNA, 38 bp, Artificial Sequence; identical to SEQ ID NO: 3893
  Probe

SEQ ID NO: 45854 - DNA, 23 bp, Artificial Sequence
  Probe
attcttgcgacccgggttcgatt

SEQ ID NO: 45855 - DNA, 38 bp, Artificial Sequence; identical to SEQ ID NO: 3895
  Probe

SEQ ID NO: 45856 - DNA, 39 bp, Artificial Sequence; identical to SEQ ID NO: 3896
  Probe

SEQ ID NO: 45857 - DNA, 50 bp, Artificial Sequence; identical to SEQ ID NO: 3900
  Probe

SEQ ID NO: 45858 - DNA, 30 bp, Artificial Sequence
  Probe
attgcaaattcgaagaagcagcttcaaacc

SEQ ID NO: 45859 - DNA, 38 bp, Artificial Sequence
  Probe
attgcaaattcgaagaagcagcttcaaacctgccgggg

SEQ ID NO: 45860 - DNA, 42 bp, Artificial Sequence; identical to SEQ ID NO: 17547
  Probe

SEQ ID NO: 45861 - DNA, 43 bp, Artificial Sequence; identical to SEQ ID NO: 3905
  Probe

SEQ ID NO: 45862 - DNA, 44 bp, Artificial Sequence; identical to SEQ ID NO: 3906
  Probe

SEQ ID NO: 45863 - DNA, 50 bp, Artificial Sequence; identical to SEQ ID NO: 38701
  Probe

SEQ ID NO: 45864 - DNA, 32 bp, Artificial Sequence; identical to SEQ ID NO: 17555
  Probe

SEQ ID NO: 45865 - DNA, 33 bp, Artificial Sequence; identical to SEQ ID NO: 3910
  Probe

SEQ ID NO: 45866 - DNA, 34 bp, Artificial Sequence; identical to SEQ ID NO: 3911
  Probe

SEQ ID NO: 45867 - DNA, 25 bp, Artificial Sequence
  Probe
attggtggttcagtggtagaattct

SEQ ID NO: 45868 - DNA, 27 bp, Artificial Sequence
  Probe
attggtggttcagtggtagaattctcg

SEQ ID NO: 45869 - DNA, 28 bp, Artificial Sequence
  Probe
attggtggttcagtggtagaattctcgc

SEQ ID NO: 45870 - DNA, 29 bp, Artificial Sequence
  Probe
attggtggttcagtggtagaattctcgcc

SEQ ID NO: 45871 - DNA, 30 bp, Artificial Sequence; identical to SEQ ID NO: 3916
  Probe

SEQ ID NO: 45872 - DNA, 31 bp, Artificial Sequence; identical to SEQ ID NO: 3919
  Probe

SEQ ID NO: 45873 - DNA, 32 bp, Artificial Sequence; identical to SEQ ID NO: 3920
  Probe

SEQ ID NO: 45874 - DNA, 33 bp, Artificial Sequence; identical to SEQ ID NO: 3921
  Probe

SEQ ID NO: 45875 - DNA, 18 bp, Artificial Sequence
  Probe
attgtgaatctgacaaca

SEQ ID NO: 45876 - DNA, 26 bp, Artificial Sequence
  Probe
attgtgaatctgacaacagaggctta

SEQ ID NO: 45877 - DNA, 31 bp, Artificial Sequence; identical to SEQ ID NO: 3923
  Probe

SEQ ID NO: 45878 - DNA, 43 bp, Artificial Sequence; identical to SEQ ID NO: 3930
  Probe

SEQ ID NO: 45879 - DNA, 44 bp, Artificial Sequence; identical to SEQ ID NO: 3931
  Probe

SEQ ID NO: 45880 - DNA, 45 bp, Artificial Sequence; identical to SEQ ID NO: 3932
  Probe

SEQ ID NO: 45881 - DNA, 50 bp, Artificial Sequence; identical to SEQ ID NO: 3934
  Probe

SEQ ID NO: 45882 - DNA, 27 bp, Artificial Sequence
  Probe
atttcaacttaacttgaccgctctgag

SEQ ID NO: 45883 - DNA, 28 bp, Artificial Sequence
  Probe
atttcaacttaacttgaccgctctgagc

SEQ ID NO: 45884 - DNA, 29 bp, Artificial Sequence
  Probe
atttcaacttaacttgaccgctctgagct

SEQ ID NO: 45885 - DNA, 41 bp, Artificial Sequence; identical to SEQ ID NO: 17589
  Probe

SEQ ID NO: 45886 - DNA, 45 bp, Artificial Sequence; identical to SEQ ID NO: 29095
  Probe

SEQ ID NO: 45887 - DNA, 26 bp, Artificial Sequence
  Probe
caaaaattttggtgcaactccaaata

SEQ ID NO: 45888 - DNA, 35 bp, Artificial Sequence; identical to SEQ ID NO: 17591
  Probe

SEQ ID NO: 45889 - DNA, 26 bp, Artificial Sequence
  Probe
caaaacatcagattgtgaatctgaca

SEQ ID NO: 45890 - DNA, 27 bp, Artificial Sequence
  Probe
caaaacatcagattgtgaatctgacaa

SEQ ID NO: 45891 - DNA, 28 bp, Artificial Sequence
  Probe
caaaacatcagattgtgaatctgacaac

SEQ ID NO: 45892 - DNA, 29 bp, Artificial Sequence
  Probe
caaaacatcagattgtgaatctgacaaca

SEQ ID NO: 45893 - DNA, 31 bp, Artificial Sequence; identical to SEQ ID NO: 17597
  Probe

SEQ ID NO: 45894 - DNA, 32 bp, Artificial Sequence; identical to SEQ ID NO: 3949
  Probe

SEQ ID NO: 45895 - DNA, 33 bp, Artificial Sequence; identical to SEQ ID NO: 3950
  Probe

SEQ ID NO: 45896 - DNA, 34 bp, Artificial Sequence; identical to SEQ ID NO: 3951
  Probe

SEQ ID NO: 45897 - DNA, 35 bp, Artificial Sequence; identical to SEQ ID NO: 3952
  Probe

SEQ ID NO: 45898 - DNA, 45 bp, Artificial Sequence; identical to SEQ ID NO: 435
  Probe

SEQ ID NO: 45899 - DNA, 48 bp, Artificial Sequence; identical to SEQ ID NO: 3954
  Probe

SEQ ID NO: 45900 - DNA, 49 bp, Artificial Sequence; identical to SEQ ID NO: 3955
  Probe

SEQ ID NO: 45901 - DNA, 49 bp, Artificial Sequence; identical to SEQ ID NO: 3957
  Probe

SEQ ID NO: 45902 - DNA, 50 bp, Artificial Sequence; identical to SEQ ID NO: 3958
  Probe

SEQ ID NO: 45903 - DNA, 16 bp, Artificial Sequence
  Probe
caaacccactccacct

SEQ ID NO: 45904 - DNA, 16 bp, Artificial Sequence
  Probe
caaagcaatacactga

SEQ ID NO: 45905 - DNA, 17 bp, Artificial Sequence
  Probe
caaagcaatacactgaa

SEQ ID NO: 45906 - DNA, 30 bp, Artificial Sequence; identical to SEQ ID NO: 17624
  Probe

SEQ ID NO: 45907 - DNA, 33 bp, Artificial Sequence; identical to SEQ ID NO: 12851
  Probe

SEQ ID NO: 45908 - DNA, 37 bp, Artificial Sequence; identical to SEQ ID NO: 439
  Probe

SEQ ID NO: 45909 - DNA, 18 bp, Artificial Sequence
  Probe
caaagcacccaacttaca

SEQ ID NO: 45910 - DNA, 21 bp, Artificial Sequence
  Probe
caaagcacccaacttacactt

SEQ ID NO: 45911 - DNA, 25 bp, Artificial Sequence
  Probe
caaagcacccaacttacacttagga

SEQ ID NO: 45912 - DNA, 26 bp, Artificial Sequence
  Probe
caaagcacccaacttacacttaggag

SEQ ID NO: 45913 - DNA, 27 bp, Artificial Sequence
  Probe
caaagcacccaacttacacttaggaga

SEQ ID NO: 45914 - DNA, 28 bp, Artificial Sequence
  Probe
caaagcacccaacttacacttaggagat

SEQ ID NO: 45915 - DNA, 29 bp, Artificial Sequence
  Probe
caaagcacccaacttacacttaggagatt

SEQ ID NO: 45916 - DNA, 30 bp, Artificial Sequence; identical to SEQ ID NO: 17635
  Probe

SEQ ID NO: 45917 - DNA, 32 bp, Artificial Sequence; identical to SEQ ID NO: 3981
  Probe

SEQ ID NO: 45918 - DNA, 35 bp, Artificial Sequence; identical to SEQ ID NO: 3984
  Probe

SEQ ID NO: 45919 - DNA, 44 bp, Artificial Sequence; identical to SEQ ID NO: 445
  Probe

SEQ ID NO: 45920 - DNA, 31 bp, Artificial Sequence; identical to SEQ ID NO: 17643
  Probe

SEQ ID NO: 45921 - DNA, 29 bp, Artificial Sequence
  Probe
caaagttaaattataggctaaatcctata

SEQ ID NO: 45922 - DNA, 31 bp, Artificial Sequence; identical to SEQ ID NO: 3988
  Probe

SEQ ID NO: 45923 - DNA, 33 bp, Artificial Sequence
  Probe
caaagttaaattataggctaaatcctatatatc

SEQ ID NO: 45924 - DNA, 21 bp, Artificial Sequence
  Probe
caaatcacgtcggggtcaaca

SEQ ID NO: 45925 - DNA, 19 bp, Artificial Sequence
  Probe
caaatcccggacgagcccc

SEQ ID NO: 45926 - DNA, 20 bp, Artificial Sequence
  Probe
caaatcccggacgagccccc

SEQ ID NO: 45927 - DNA, 21 bp, Artificial Sequence
  Probe
caaatcccggacgagccccct

SEQ ID NO: 45928 - DNA, 21 bp, Artificial Sequence
  Probe
caaatccgggtgccccctcaa

SEQ ID NO: 45929 - DNA, 18 bp, Artificial Sequence
  Probe
caaatctcggtggaacct

SEQ ID NO: 45930 - DNA, 39 bp, Artificial Sequence; identical to SEQ ID NO: 3994
  Probe

SEQ ID NO: 45931 - DNA, 40 bp, Artificial Sequence; identical to SEQ ID NO: 3995
  Probe

SEQ ID NO: 45932 - DNA, 20 bp, Artificial Sequence
  Probe
caacacctctttacagtgaa

SEQ ID NO: 45933 - DNA, 22 bp, Artificial Sequence
  Probe
caacacctctttacagtgaaat

SEQ ID NO: 45934 - DNA, 29 bp, Artificial Sequence
  Probe
caacagaggcttacgaccccttatttacc

SEQ ID NO: 45935 - DNA, 30 bp, Artificial Sequence; identical to SEQ ID NO: 4001
  Probe

SEQ ID NO: 45936 - DNA, 31 bp, Artificial Sequence; identical to SEQ ID NO: 4002
  Probe

SEQ ID NO: 45937 - DNA, 32 bp, Artificial Sequence; identical to SEQ ID NO: 4003
  Probe

SEQ ID NO: 45938 - DNA, 29 bp, Artificial Sequence
  Probe
caacctcggttcgaatccgagtcacggca

SEQ ID NO: 45939 - DNA, 31 bp, Artificial Sequence; identical to SEQ ID NO: 4006
  Probe

SEQ ID NO: 45940 - DNA, 31 bp, Artificial Sequence; identical to SEQ ID NO: 4007
  Probe

SEQ ID NO: 45941 - DNA, 32 bp, Artificial Sequence; identical to SEQ ID NO: 4008
  Probe

SEQ ID NO: 45942 - DNA, 31 bp, Artificial Sequence; identical to SEQ ID NO: 4009
  Probe

SEQ ID NO: 45943 - DNA, 32 bp, Artificial Sequence; identical to SEQ ID NO: 4010
  Probe

SEQ ID NO: 45944 - DNA, 28 bp, Artificial Sequence
  Probe
caacgatggtttttcatatcattggtcg

SEQ ID NO: 45945 - DNA, 35 bp, Artificial Sequence
  Probe
caacgatggtttttcatatcattggtcgtggttgt

SEQ ID NO: 45946 - DNA, 39 bp, Artificial Sequence; identical to SEQ ID NO: 29167
  Probe

SEQ ID NO: 45947 - DNA, 43 bp, Artificial Sequence
  Probe
caacgatggtttttcatatcattggtcgtggttgtagtccgtg

SEQ ID NO: 45948 - DNA, 45 bp, Artificial Sequence
  Probe
caacgatggtttttcatatcattggtcgtggttgtagtccgtgcg

SEQ ID NO: 45949 - DNA, 50 bp, Artificial Sequence; identical to SEQ ID NO: 4011
  Probe

SEQ ID NO: 45950 - DNA, 22 bp, Artificial Sequence
  Probe
caactaaatactaccgtatggc

SEQ ID NO: 45951 - DNA, 16 bp, Artificial Sequence
  Probe
caacttaacttgaccg

SEQ ID NO: 45952 - DNA, 17 bp, Artificial Sequence
  Probe
caacttaacttgaccgc

SEQ ID NO: 45953 - DNA, 18 bp, Artificial Sequence
  Probe
caacttaacttgaccgct

SEQ ID NO: 45954 - DNA, 19 bp, Artificial Sequence
  Probe
caacttaacttgaccgctc

SEQ ID NO: 45955 - DNA, 20 bp, Artificial Sequence
  Probe
caacttaacttgaccgctct

SEQ ID NO: 45956 - DNA, 22 bp, Artificial Sequence
  Probe
caacttaacttgaccgctctga

SEQ ID NO: 45957 - DNA, 23 bp, Artificial Sequence
  Probe
caacttaacttgaccgctctgag

SEQ ID NO: 45958 - DNA, 24 bp, Artificial Sequence
  Probe
caacttaacttgaccgctctgagc

SEQ ID NO: 45959 - DNA, 25 bp, Artificial Sequence
  Probe
caacttaacttgaccgctctgagct

SEQ ID NO: 45960 - DNA, 16 bp, Artificial Sequence
  Probe
caacttacacttagga

SEQ ID NO: 45961 - DNA, 17 bp, Artificial Sequence
  Probe
caacttacacttaggag

SEQ ID NO: 45962 - DNA, 18 bp, Artificial Sequence
  Probe
caacttacacttaggaga

SEQ ID NO: 45963 - DNA, 19 bp, Artificial Sequence
  Probe
caacttacacttaggagat

SEQ ID NO: 45964 - DNA, 20 bp, Artificial Sequence
  Probe
caacttacacttaggagatt

SEQ ID NO: 45965 - DNA, 21 bp, Artificial Sequence
  Probe
caacttacacttaggagattt

SEQ ID NO: 45966 - DNA, 23 bp, Artificial Sequence
  Probe
caacttacacttaggagatttca

SEQ ID NO: 45967 - DNA, 26 bp, Artificial Sequence
  Probe
caacttacacttaggagatttcaact

SEQ ID NO: 45968 - DNA, 27 bp, Artificial Sequence
  Probe
caacttacacttaggagatttcaactt

SEQ ID NO: 45969 - DNA, 28 bp, Artificial Sequence
  Probe
caacttacacttaggagatttcaactta

SEQ ID NO: 45970 - DNA, 29 bp, Artificial Sequence
  Probe
caacttacacttaggagatttcaacttaa

SEQ ID NO: 45971 - DNA, 30 bp, Artificial Sequence
  Probe
caacttacacttaggagatttcaacttaac

SEQ ID NO: 45972 - DNA, 31 bp, Artificial Sequence; identical to SEQ ID NO: 17688
  Probe

SEQ ID NO: 45973 - DNA, 32 bp, Artificial Sequence; identical to SEQ ID NO: 17689
  Probe

SEQ ID NO: 45974 - DNA, 33 bp, Artificial Sequence; identical to SEQ ID NO: 4024
  Probe

SEQ ID NO: 45975 - DNA, 35 bp, Artificial Sequence; identical to SEQ ID NO: 4025
  Probe

SEQ ID NO: 45976 - DNA, 36 bp, Artificial Sequence; identical to SEQ ID NO: 17692
  Probe

SEQ ID NO: 45977 - DNA, 37 bp, Artificial Sequence; identical to SEQ ID NO: 4026
  Probe

SEQ ID NO: 45978 - DNA, 38 bp, Artificial Sequence; identical to SEQ ID NO: 17694
  Probe

SEQ ID NO: 45979 - DNA, 39 bp, Artificial Sequence; identical to SEQ ID NO: 4027
  Probe

SEQ ID NO: 45980 - DNA, 40 bp, Artificial Sequence; identical to SEQ ID NO: 29193
  Probe

SEQ ID NO: 45981 - DNA, 41 bp, Artificial Sequence; identical to SEQ ID NO: 4028
  Probe

SEQ ID NO: 45982 - DNA, 42 bp, Artificial Sequence; identical to SEQ ID NO: 17697
  Probe

SEQ ID NO: 45983 - DNA, 43 bp, Artificial Sequence; identical to SEQ ID NO: 4029
  Probe

SEQ ID NO: 45984 - DNA, 44 bp, Artificial Sequence; identical to SEQ ID NO: 4030
  Probe

SEQ ID NO: 45985 - DNA, 45 bp, Artificial Sequence; identical to SEQ ID NO: 4031
  Probe

SEQ ID NO: 45986 - DNA, 46 bp, Artificial Sequence; identical to SEQ ID NO: 4032
  Probe

SEQ ID NO: 45987 - DNA, 50 bp, Artificial Sequence; identical to SEQ ID NO: 4034
  Probe

SEQ ID NO: 45988 - DNA, 18 bp, Artificial Sequence
  Probe
caagaacagggtttgtta

SEQ ID NO: 45989 - DNA, 17 bp, Artificial Sequence
  Probe
caagaactgctaactca

SEQ ID NO: 45990 - DNA, 19 bp, Artificial Sequence
  Probe
caagaactgctaactcatg

SEQ ID NO: 45991 - DNA, 29 bp, Artificial Sequence
  Probe
caagaactgctaactcatgcccccatgtc

SEQ ID NO: 45992 - DNA, 34 bp, Artificial Sequence; identical to SEQ ID NO: 12858
  Probe

SEQ ID NO: 45993 - DNA, 42 bp, Artificial Sequence; identical to SEQ ID NO: 449
  Probe

SEQ ID NO: 45994 - DNA, 45 bp, Artificial Sequence; identical to SEQ ID NO: 451
  Probe

SEQ ID NO: 45995 - DNA, 46 bp, Artificial Sequence; identical to SEQ ID NO: 452
  Probe

SEQ ID NO: 45996 - DNA, 50 bp, Artificial Sequence; identical to SEQ ID NO: 4044
  Probe

SEQ ID NO: 45997 - DNA, 23 bp, Artificial Sequence
  Probe
caagcagttgacccgggttcgat

SEQ ID NO: 45998 - DNA, 40 bp, Artificial Sequence; identical to SEQ ID NO: 17726
  Probe

SEQ ID NO: 45999 - DNA, 40 bp, Artificial Sequence; identical to SEQ ID NO: 17728
  Probe

SEQ ID NO: 46000 - DNA, 30 bp, Artificial Sequence
  Probe
caaggtcgcgggttcgatccccgtacgggc

SEQ ID NO: 46001 - DNA, 31 bp, Artificial Sequence; identical to SEQ ID NO: 29238
  Probe

SEQ ID NO: 46002 - DNA, 32 bp, Artificial Sequence
  Probe
caaggtcgcgggttcgatccccgtacgggcca

SEQ ID NO: 46003 - DNA, 33 bp, Artificial Sequence
  Probe
caaggtcgcgggttcgatccccgtacgggccac

SEQ ID NO: 46004 - DNA, 35 bp, Artificial Sequence; identical to SEQ ID NO: 17729
  Probe

SEQ ID NO: 46005 - DNA, 35 bp, Artificial Sequence; identical to SEQ ID NO: 17730
  Probe

SEQ ID NO: 46006 - DNA, 21 bp, Artificial Sequence
  Probe
caagtccctgttcgggcggca

SEQ ID NO: 46007 - DNA, 50 bp, Artificial Sequence; identical to SEQ ID NO: 4055
  Probe

SEQ ID NO: 46008 - DNA, 18 bp, Artificial Sequence
  Probe
caatccccggcacctcca

SEQ ID NO: 46009 - DNA, 40 bp, Artificial Sequence
  Probe
caatggggtttccccgcacaggttcgaatcctgttcgtga

SEQ ID NO: 46010 - DNA, 38 bp, Artificial Sequence; identical to SEQ ID NO: 4060
  Probe

SEQ ID NO: 46011 - DNA, 39 bp, Artificial Sequence; identical to SEQ ID NO: 4061
  Probe

SEQ ID NO: 46012 - DNA, 21 bp, Artificial Sequence
  Probe
caattcccggtcagggaacca

SEQ ID NO: 46013 - DNA, 16 bp, Artificial Sequence
  Probe
cacaaagcacccaact

SEQ ID NO: 46014 - DNA, 20 bp, Artificial Sequence
  Probe
cacaaagcacccaacttaca

SEQ ID NO: 46015 - DNA, 30 bp, Artificial Sequence
  Probe
cacaaagcacccaacttacacttaggagat

SEQ ID NO: 46016 - DNA, 31 bp, Artificial Sequence; identical to SEQ ID NO: 4074
  Probe

SEQ ID NO: 46017 - DNA, 39 bp, Artificial Sequence; identical to SEQ ID NO: 4080
  Probe

SEQ ID NO: 46018 - DNA, 42 bp, Artificial Sequence
  Probe
cacaaagcacccaacttacacttaggagatttcaacttaact

SEQ ID NO: 46019 - DNA, 46 bp, Artificial Sequence; identical to SEQ ID NO: 4082
  Probe

SEQ ID NO: 46020 - DNA, 48 bp, Artificial Sequence; identical to SEQ ID NO: 4084
  Probe

SEQ ID NO: 46021 - DNA, 18 bp, Artificial Sequence
  Probe
cacaagaactgctaactc

SEQ ID NO: 46022 - DNA, 21 bp, Artificial Sequence
  Probe
cacaagaactgctaactcatg

SEQ ID NO: 46023 - DNA, 23 bp, Artificial Sequence
  Probe
cacaagaactgctaactcatgcc

SEQ ID NO: 46024 - DNA, 24 bp, Artificial Sequence
  Probe
cacaagaactgctaactcatgccc

SEQ ID NO: 46025 - DNA, 31 bp, Artificial Sequence; identical to SEQ ID NO: 4089
  Probe

SEQ ID NO: 46026 - DNA, 32 bp, Artificial Sequence; identical to SEQ ID NO: 4090
  Probe

SEQ ID NO: 46027 - DNA, 36 bp, Artificial Sequence; identical to SEQ ID NO: 25120
  Probe

SEQ ID NO: 46028 - DNA, 44 bp, Artificial Sequence; identical to SEQ ID NO: 463
  Probe

SEQ ID NO: 46029 - DNA, 49 bp, Artificial Sequence; identical to SEQ ID NO: 4093
  Probe

SEQ ID NO: 46030 - DNA, 18 bp, Artificial Sequence
  Probe
cacacccacccaagaaca

SEQ ID NO: 46031 - DNA, 19 bp, Artificial Sequence
  Probe
cacacccacccaagaacag

SEQ ID NO: 46032 - DNA, 20 bp, Artificial Sequence
  Probe
cacacccacccaagaacagg

SEQ ID NO: 46033 - DNA, 25 bp, Artificial Sequence
  Probe
cacacccacccaagaacagggtttg

SEQ ID NO: 46034 - DNA, 27 bp, Artificial Sequence
  Probe
cacacccacccaagaacagggtttgtt

SEQ ID NO: 46035 - DNA, 28 bp, Artificial Sequence
  Probe
cacacccacccaagaacagggtttgtta

SEQ ID NO: 46036 - DNA, 31 bp, Artificial Sequence
  Probe
cacacccacccaagaacagggtttgttaaga

SEQ ID NO: 46037 - DNA, 21 bp, Artificial Sequence
  Probe
cacacgcgaaaggtccccggt

SEQ ID NO: 46038 - DNA, 36 bp, Artificial Sequence
  Probe
cacacgcgaaaggtccccggttcgaaaccgggcgga

SEQ ID NO: 46039 - DNA, 43 bp, Artificial Sequence
  Probe
cacacgcgaaaggtccccggttcgaaaccgggcggaaacacct

SEQ ID NO: 46040 - DNA, 20 bp, Artificial Sequence
  Probe
cacacggggcacaataattt

SEQ ID NO: 46041 - DNA, 21 bp, Artificial Sequence
  Probe
cacactactataaccacccta

SEQ ID NO: 46042 - DNA, 16 bp, Artificial Sequence
  Probe
cacatcaccccataaa

SEQ ID NO: 46043 - DNA, 17 bp, Artificial Sequence
  Probe
cacatcaccccataaac

SEQ ID NO: 46044 - DNA, 18 bp, Artificial Sequence
  Probe
cacatcaccccataaaca

SEQ ID NO: 46045 - DNA, 20 bp, Artificial Sequence
  Probe
cacatcaccccataaacaaa

SEQ ID NO: 46046 - DNA, 21 bp, Artificial Sequence
  Probe
cacatcaccccataaacaaat

SEQ ID NO: 46047 - DNA, 50 bp, Artificial Sequence
  Probe
caccagtcttgtaaaccggagatgaaaacctttttccaaggacaaatcag

SEQ ID NO: 46048 - DNA, 18 bp, Artificial Sequence
  Probe
cacccaacttacacttag

SEQ ID NO: 46049 - DNA, 20 bp, Artificial Sequence
  Probe
cacccaacttacacttagga

SEQ ID NO: 46050 - DNA, 21 bp, Artificial Sequence
  Probe
cacccaacttacacttaggag

SEQ ID NO: 46051 - DNA, 22 bp, Artificial Sequence
  Probe
cacccaacttacacttaggaga

SEQ ID NO: 46052 - DNA, 23 bp, Artificial Sequence
  Probe
cacccaacttacacttaggagat

SEQ ID NO: 46053 - DNA, 27 bp, Artificial Sequence
  Probe
cacccaacttacacttaggagatttca

SEQ ID NO: 46054 - DNA, 36 bp, Artificial Sequence; identical to SEQ ID NO: 29292
  Probe

SEQ ID NO: 46055 - DNA, 37 bp, Artificial Sequence
  Probe
cacccaacttacacttaggagatttcaacttaacttg

SEQ ID NO: 46056 - DNA, 39 bp, Artificial Sequence; identical to SEQ ID NO: 4110
  Probe

SEQ ID NO: 46057 - DNA, 40 bp, Artificial Sequence
  Probe
cacccaacttacacttaggagatttcaacttaacttgacc

SEQ ID NO: 46058 - DNA, 41 bp, Artificial Sequence; identical to SEQ ID NO: 4111
  Probe

SEQ ID NO: 46059 - DNA, 42 bp, Artificial Sequence
  Probe
cacccaacttacacttaggagatttcaacttaacttgaccgc

SEQ ID NO: 46060 - DNA, 43 bp, Artificial Sequence
  Probe
cacccaacttacacttaggagatttcaacttaacttgaccgct

SEQ ID NO: 46061 - DNA, 44 bp, Artificial Sequence; identical to SEQ ID NO: 29293
  Probe

SEQ ID NO: 46062 - DNA, 45 bp, Artificial Sequence; identical to SEQ ID NO: 29294
  Probe

SEQ ID NO: 46063 - DNA, 46 bp, Artificial Sequence
  Probe
cacccaacttacacttaggagatttcaacttaacttgaccgctctg

SEQ ID NO: 46064 - DNA, 48 bp, Artificial Sequence; identical to SEQ ID NO: 4112
  Probe

SEQ ID NO: 46065 - DNA, 49 bp, Artificial Sequence; identical to SEQ ID NO: 4113
  Probe

SEQ ID NO: 46066 - DNA, 50 bp, Artificial Sequence; identical to SEQ ID NO: 4114
  Probe

SEQ ID NO: 46067 - DNA, 26 bp, Artificial Sequence
  Probe
cacccacccaagaacagggtttgtta

SEQ ID NO: 46068 - DNA, 21 bp, Artificial Sequence
  Probe
cacctcagaaggtctcacttt

SEQ ID NO: 46069 - DNA, 22 bp, Artificial Sequence
  Probe
cacctcagaaggtctcactttt

SEQ ID NO: 46070 - DNA, 23 bp, Artificial Sequence
  Probe
cacgcagaaggtcctgggttcga

SEQ ID NO: 46071 - DNA, 36 bp, Artificial Sequence; identical to SEQ ID NO: 29340
  Probe

SEQ ID NO: 46072 - DNA, 37 bp, Artificial Sequence; identical to SEQ ID NO: 36357
  Probe

SEQ ID NO: 46073 - DNA, 39 bp, Artificial Sequence
  Probe
cacgcagaaggtcctgggttcgagccccagtggaaccac

SEQ ID NO: 46074 - DNA, 40 bp, Artificial Sequence; identical to SEQ ID NO: 4121
  Probe

SEQ ID NO: 46075 - DNA, 41 bp, Artificial Sequence; identical to SEQ ID NO: 4122
  Probe

SEQ ID NO: 46076 - DNA, 50 bp, Artificial Sequence
  Probe
cacgcagaaggtcctgggttcgagccccagtggaaccacggcgtgattca

SEQ ID NO: 46077 - DNA, 50 bp, Artificial Sequence
  Probe
cacgcagaaggtcctgggttcgagccccagtggaaccatagccgtaaggc

SEQ ID NO: 46078 - DNA, 16 bp, Artificial Sequence
  Probe
cacgcgaaaggtcccc

SEQ ID NO: 46079 - DNA, 17 bp, Artificial Sequence
  Probe
cacgcgaaaggtccccg

SEQ ID NO: 46080 - DNA, 19 bp, Artificial Sequence
  Probe
cacgcgaaaggtccccggt

SEQ ID NO: 46081 - DNA, 23 bp, Artificial Sequence
  Probe
cacgcgaaaggtccccggttcga

SEQ ID NO: 46082 - DNA, 38 bp, Artificial Sequence
  Probe
cacgcgaaaggtccccggttcgaaaccgggcggaaaca

SEQ ID NO: 46083 - DNA, 41 bp, Artificial Sequence
  Probe
cacgcgaaaggtccccggttcgaaaccgggcggaaacacct

SEQ ID NO: 46084 - DNA, 41 bp, Artificial Sequence
  Probe
cacgcgaaaggtccccggttcgatcccgggcggaaacaggt

SEQ ID NO: 46085 - DNA, 18 bp, Artificial Sequence
  Probe
cacgcgggagaccggggt

SEQ ID NO: 46086 - DNA, 32 bp, Artificial Sequence; identical to SEQ ID NO: 475
  Probe

SEQ ID NO: 46087 - DNA, 33 bp, Artificial Sequence; identical to SEQ ID NO: 476
  Probe

SEQ ID NO: 46088 - DNA, 34 bp, Artificial Sequence; identical to SEQ ID NO: 4128
  Probe

SEQ ID NO: 46089 - DNA, 35 bp, Artificial Sequence; identical to SEQ ID NO: 17774
  Probe

SEQ ID NO: 46090 - DNA, 38 bp, Artificial Sequence; identical to SEQ ID NO: 4129
  Probe

SEQ ID NO: 46091 - DNA, 39 bp, Artificial Sequence; identical to SEQ ID NO: 4130
  Probe

SEQ ID NO: 46092 - DNA, 40 bp, Artificial Sequence; identical to SEQ ID NO: 4131
  Probe

SEQ ID NO: 46093 - DNA, 41 bp, Artificial Sequence; identical to SEQ ID NO: 4132
  Probe

SEQ ID NO: 46094 - DNA, 21 bp, Artificial Sequence
  Probe
cacgcgggagaccggggttcg

SEQ ID NO: 46095 - DNA, 40 bp, Artificial Sequence
  Probe
cacgcgggagaccggggttcgattccccaacggggaggct

SEQ ID NO: 46096 - DNA, 38 bp, Artificial Sequence; identical to SEQ ID NO: 4137
  Probe

SEQ ID NO: 46097 - DNA, 39 bp, Artificial Sequence; identical to SEQ ID NO: 4138
  Probe

SEQ ID NO: 46098 - DNA, 40 bp, Artificial Sequence; identical to SEQ ID NO: 4139
  Probe

SEQ ID NO: 46099 - DNA, 41 bp, Artificial Sequence; identical to SEQ ID NO: 4140
  Probe

SEQ ID NO: 46100 - DNA, 48 bp, Artificial Sequence; identical to SEQ ID NO: 4142
  Probe

SEQ ID NO: 46101 - DNA, 50 bp, Artificial Sequence; identical to SEQ ID NO: 4143
  Probe

SEQ ID NO: 46102 - DNA, 39 bp, Artificial Sequence; identical to SEQ ID NO: 4144
  Probe

SEQ ID NO: 46103 - DNA, 40 bp, Artificial Sequence; identical to SEQ ID NO: 4145
  Probe

SEQ ID NO: 46104 - DNA, 39 bp, Artificial Sequence; identical to SEQ ID NO: 4146
  Probe

SEQ ID NO: 46105 - DNA, 40 bp, Artificial Sequence; identical to SEQ ID NO: 4147
  Probe

SEQ ID NO: 46106 - DNA, 41 bp, Artificial Sequence; identical to SEQ ID NO: 4148
  Probe

SEQ ID NO: 46107 - DNA, 38 bp, Artificial Sequence; identical to SEQ ID NO: 4149
  Probe

SEQ ID NO: 46108 - DNA, 39 bp, Artificial Sequence; identical to SEQ ID NO: 4150
  Probe

SEQ ID NO: 46109 - DNA, 50 bp, Artificial Sequence; identical to SEQ ID NO: 4153
  Probe

SEQ ID NO: 46110 - DNA, 39 bp, Artificial Sequence; identical to SEQ ID NO: 4154
  Probe

SEQ ID NO: 46111 - DNA, 40 bp, Artificial Sequence; identical to SEQ ID NO: 4155
  Probe

SEQ ID NO: 46112 - DNA, 41 bp, Artificial Sequence; identical to SEQ ID NO: 4156
  Probe

SEQ ID NO: 46113 - DNA, 46 bp, Artificial Sequence; identical to SEQ ID NO: 4158
  Probe

SEQ ID NO: 46114 - DNA, 47 bp, Artificial Sequence; identical to SEQ ID NO: 4159
  Probe

SEQ ID NO: 46115 - DNA, 48 bp, Artificial Sequence; identical to SEQ ID NO: 4160
  Probe

SEQ ID NO: 46116 - DNA, 50 bp, Artificial Sequence; identical to SEQ ID NO: 4162
  Probe

SEQ ID NO: 46117 - DNA, 41 bp, Artificial Sequence; identical to SEQ ID NO: 4163
  Probe

SEQ ID NO: 46118 - DNA, 46 bp, Artificial Sequence
  Probe
cacgcgggagaccggggttcgattccccgacggggaggcagccgtg

SEQ ID NO: 46119 - DNA, 50 bp, Artificial Sequence
  Probe
cacgcgggagaccggggttcgattccccgacggggaggcagccgtgcttt

SEQ ID NO: 46120 - DNA, 40 bp, Artificial Sequence; identical to SEQ ID NO: 4165
  Probe

SEQ ID NO: 46121 - DNA, 41 bp, Artificial Sequence; identical to SEQ ID NO: 4166
  Probe

SEQ ID NO: 46122 - DNA, 42 bp, Artificial Sequence; identical to SEQ ID NO: 4167
  Probe

SEQ ID NO: 46123 - DNA, 43 bp, Artificial Sequence; identical to SEQ ID NO: 4168
  Probe

SEQ ID NO: 46124 - DNA, 28 bp, Artificial Sequence
  Probe
cacgcgtgggttcgaatcccatcctcgt

SEQ ID NO: 46125 - DNA, 18 bp, Artificial Sequence
  Probe
cacggggcacaataattt

SEQ ID NO: 46126 - DNA, 19 bp, Artificial Sequence
  Probe
cactactataaccacccta

SEQ ID NO: 46127 - DNA, 50 bp, Artificial Sequence; identical to SEQ ID NO: 4176
  Probe

SEQ ID NO: 46128 - DNA, 43 bp, Artificial Sequence
  Probe
cactgaaaatgtttagacgggctcacatcaccccataaacaaa

SEQ ID NO: 46129 - DNA, 16 bp, Artificial Sequence
  Probe
cactgtaaagctaact

SEQ ID NO: 46130 - DNA, 26 bp, Artificial Sequence
  Probe
cactgtaaagctaacttagcattaac

SEQ ID NO: 46131 - DNA, 29 bp, Artificial Sequence
  Probe
cactgtaaagctaacttagcattaacctt

SEQ ID NO: 46132 - DNA, 31 bp, Artificial Sequence; identical to SEQ ID NO: 494
  Probe

SEQ ID NO: 46133 - DNA, 32 bp, Artificial Sequence; identical to SEQ ID NO: 495
  Probe

SEQ ID NO: 46134 - DNA, 33 bp, Artificial Sequence; identical to SEQ ID NO: 4180
  Probe

SEQ ID NO: 46135 - DNA, 34 bp, Artificial Sequence; identical to SEQ ID NO: 496
  Probe

SEQ ID NO: 46136 - DNA, 35 bp, Artificial Sequence; identical to SEQ ID NO: 497
  Probe

SEQ ID NO: 46137 - DNA, 36 bp, Artificial Sequence; identical to SEQ ID NO: 498
  Probe

SEQ ID NO: 46138 - DNA, 37 bp, Artificial Sequence; identical to SEQ ID NO: 4181
  Probe

SEQ ID NO: 46139 - DNA, 38 bp, Artificial Sequence; identical to SEQ ID NO: 17810
  Probe

SEQ ID NO: 46140 - DNA, 39 bp, Artificial Sequence; identical to SEQ ID NO: 499
  Probe

SEQ ID NO: 46141 - DNA, 40 bp, Artificial Sequence; identical to SEQ ID NO: 4182
  Probe

SEQ ID NO: 46142 - DNA, 41 bp, Artificial Sequence; identical to SEQ ID NO: 500
  Probe

SEQ ID NO: 46143 - DNA, 42 bp, Artificial Sequence; identical to SEQ ID NO: 4183
  Probe

SEQ ID NO: 46144 - DNA, 43 bp, Artificial Sequence; identical to SEQ ID NO: 501
  Probe

SEQ ID NO: 46145 - DNA, 44 bp, Artificial Sequence; identical to SEQ ID NO: 4184
  Probe

SEQ ID NO: 46146 - DNA, 48 bp, Artificial Sequence; identical to SEQ ID NO: 4186
  Probe

SEQ ID NO: 46147 - DNA, 49 bp, Artificial Sequence; identical to SEQ ID NO: 4187
  Probe

SEQ ID NO: 46148 - DNA, 26 bp, Artificial Sequence
  Probe
cacttaggagatttcaacttaacttg

SEQ ID NO: 46149 - DNA, 28 bp, Artificial Sequence
  Probe
cacttaggagatttcaacttaacttgac

SEQ ID NO: 46150 - DNA, 29 bp, Artificial Sequence
  Probe
cacttaggagatttcaacttaacttgacc

SEQ ID NO: 46151 - DNA, 30 bp, Artificial Sequence; identical to SEQ ID NO: 4195
  Probe

SEQ ID NO: 46152 - DNA, 31 bp, Artificial Sequence; identical to SEQ ID NO: 4196
  Probe

SEQ ID NO: 46153 - DNA, 32 bp, Artificial Sequence; identical to SEQ ID NO: 4197
  Probe

SEQ ID NO: 46154 - DNA, 34 bp, Artificial Sequence; identical to SEQ ID NO: 4199
  Probe

SEQ ID NO: 46155 - DNA, 35 bp, Artificial Sequence; identical to SEQ ID NO: 4200
  Probe

SEQ ID NO: 46156 - DNA, 36 bp, Artificial Sequence; identical to SEQ ID NO: 4201
  Probe

SEQ ID NO: 46157 - DNA, 37 bp, Artificial Sequence; identical to SEQ ID NO: 4202
  Probe

SEQ ID NO: 46158 - DNA, 38 bp, Artificial Sequence; identical to SEQ ID NO: 4203
  Probe

SEQ ID NO: 46159 - DNA, 39 bp, Artificial Sequence; identical to SEQ ID NO: 4204
  Probe

SEQ ID NO: 46160 - DNA, 40 bp, Artificial Sequence; identical to SEQ ID NO: 4205
  Probe

SEQ ID NO: 46161 - DNA, 41 bp, Artificial Sequence; identical to SEQ ID NO: 4206
  Probe

SEQ ID NO: 46162 - DNA, 31 bp, Artificial Sequence; identical to SEQ ID NO: 4215
  Probe

SEQ ID NO: 46163 - DNA, 34 bp, Artificial Sequence; identical to SEQ ID NO: 4217
  Probe

SEQ ID NO: 46164 - DNA, 32 bp, Artificial Sequence; identical to SEQ ID NO: 4220
  Probe

SEQ ID NO: 46165 - DNA, 31 bp, Artificial Sequence; identical to SEQ ID NO: 17836
  Probe

SEQ ID NO: 46166 - DNA, 36 bp, Artificial Sequence; identical to SEQ ID NO: 4221
  Probe

SEQ ID NO: 46167 - DNA, 37 bp, Artificial Sequence; identical to SEQ ID NO: 4222
  Probe

SEQ ID NO: 46168 - DNA, 37 bp, Artificial Sequence
  Probe
cagaaggttgcgtgttcaaatcacgtcggggtcaaac

SEQ ID NO: 46169 - DNA, 37 bp, Artificial Sequence
  Probe
cagaaggttgcgtgttcaaatcacgtcggggtcaaca

SEQ ID NO: 46170 - DNA, 33 bp, Artificial Sequence
  Probe
cagaaggttgcgtgttcaagtcacgtcggggtc

SEQ ID NO: 46171 - DNA, 16 bp, Artificial Sequence
  Probe
cagaccaagagccttc

SEQ ID NO: 46172 - DNA, 49 bp, Artificial Sequence; identical to SEQ ID NO: 4227
  Probe

SEQ ID NO: 46173 - DNA, 50 bp, Artificial Sequence; identical to SEQ ID NO: 514
  Probe

SEQ ID NO: 46174 - DNA, 18 bp, Artificial Sequence
  Probe
cagagaatagtttaaatt

SEQ ID NO: 46175 - DNA, 20 bp, Artificial Sequence
  Probe
cagagaatagtttaaattag

SEQ ID NO: 46176 - DNA, 25 bp, Artificial Sequence
  Probe
cagagaatagtttaaattagaatct

SEQ ID NO: 46177 - DNA, 27 bp, Artificial Sequence
  Probe
cagagaatagtttaaattagaatctta

SEQ ID NO: 46178 - DNA, 28 bp, Artificial Sequence
  Probe
cagagaatagtttaaattagaatcttag

SEQ ID NO: 46179 - DNA, 29 bp, Artificial Sequence
  Probe
cagagaatagtttaaattagaatcttagc

SEQ ID NO: 46180 - DNA, 31 bp, Artificial Sequence; identical to SEQ ID NO: 520
  Probe

SEQ ID NO: 46181 - DNA, 33 bp, Artificial Sequence; identical to SEQ ID NO: 522
  Probe

SEQ ID NO: 46182 - DNA, 34 bp, Artificial Sequence; identical to SEQ ID NO: 523
  Probe

SEQ ID NO: 46183 - DNA, 35 bp, Artificial Sequence; identical to SEQ ID NO: 4232
  Probe

SEQ ID NO: 46184 - DNA, 36 bp, Artificial Sequence; identical to SEQ ID NO: 4233
  Probe

SEQ ID NO: 46185 - DNA, 37 bp, Artificial Sequence; identical to SEQ ID NO: 4234
  Probe

SEQ ID NO: 46186 - DNA, 38 bp, Artificial Sequence; identical to SEQ ID NO: 4235
  Probe

SEQ ID NO: 46187 - DNA, 39 bp, Artificial Sequence; identical to SEQ ID NO: 4236
  Probe

SEQ ID NO: 46188 - DNA, 40 bp, Artificial Sequence; identical to SEQ ID NO: 524
  Probe

SEQ ID NO: 46189 - DNA, 50 bp, Artificial Sequence; identical to SEQ ID NO: 526
  Probe

SEQ ID NO: 46190 - DNA, 18 bp, Artificial Sequence
  Probe
cagagcccggtaatcgca

SEQ ID NO: 46191 - DNA, 21 bp, Artificial Sequence
  Probe
cagagcccggtaatcgcataa

SEQ ID NO: 46192 - DNA, 27 bp, Artificial Sequence
  Probe
cagagcccggtaatcgcataaaactta

SEQ ID NO: 46193 - DNA, 32 bp, Artificial Sequence; identical to SEQ ID NO: 17870
  Probe

SEQ ID NO: 46194 - DNA, 37 bp, Artificial Sequence
  Probe
cagagcccggtaatcgcataaaacttaaaactttaca

SEQ ID NO: 46195 - DNA, 40 bp, Artificial Sequence
  Probe
cagagcccggtaatcgcataaaacttaaaactttacagtc

SEQ ID NO: 46196 - DNA, 44 bp, Artificial Sequence
  Probe
cagagcccggtaatcgcataaaacttaaaactttacagtcagag

SEQ ID NO: 46197 - DNA, 50 bp, Artificial Sequence; identical to SEQ ID NO: 4242
  Probe

SEQ ID NO: 46198 - DNA, 26 bp, Artificial Sequence
  Probe
cagaggcttacgaccccttatttacc

SEQ ID NO: 46199 - DNA, 27 bp, Artificial Sequence
  Probe
cagaggcttacgaccccttatttaccg

SEQ ID NO: 46200 - DNA, 25 bp, Artificial Sequence
  Probe
cagagtggggttttgcagtccttag

SEQ ID NO: 46201 - DNA, 27 bp, Artificial Sequence
  Probe
cagagtggggttttgcagtccttagct

SEQ ID NO: 46202 - DNA, 18 bp, Artificial Sequence
  Probe
cagagtgtagcttaacac

SEQ ID NO: 46203 - DNA, 19 bp, Artificial Sequence
  Probe
cagagtgtagcttaacaca

SEQ ID NO: 46204 - DNA, 21 bp, Artificial Sequence
  Probe
cagagtgtagcttaacacaaa

SEQ ID NO: 46205 - DNA, 23 bp, Artificial Sequence
  Probe
cagagtgtagcttaacacaaagc

SEQ ID NO: 46206 - DNA, 24 bp, Artificial Sequence
  Probe
cagagtgtagcttaacacaaagca

SEQ ID NO: 46207 - DNA, 25 bp, Artificial Sequence
  Probe
cagagtgtagcttaacacaaagcac

SEQ ID NO: 46208 - DNA, 26 bp, Artificial Sequence
  Probe
cagagtgtagcttaacacaaagcacc

SEQ ID NO: 46209 - DNA, 27 bp, Artificial Sequence
  Probe
cagagtgtagcttaacacaaagcaccc

SEQ ID NO: 46210 - DNA, 28 bp, Artificial Sequence
  Probe
cagagtgtagcttaacacaaagcaccca

SEQ ID NO: 46211 - DNA, 29 bp, Artificial Sequence
  Probe
cagagtgtagcttaacacaaagcacccaa

SEQ ID NO: 46212 - DNA, 30 bp, Artificial Sequence; identical to SEQ ID NO: 4262
  Probe

SEQ ID NO: 46213 - DNA, 31 bp, Artificial Sequence; identical to SEQ ID NO: 4263
  Probe

SEQ ID NO: 46214 - DNA, 32 bp, Artificial Sequence; identical to SEQ ID NO: 4264
  Probe

SEQ ID NO: 46215 - DNA, 33 bp, Artificial Sequence; identical to SEQ ID NO: 4265
  Probe

SEQ ID NO: 46216 - DNA, 34 bp, Artificial Sequence; identical to SEQ ID NO: 4266
  Probe

SEQ ID NO: 46217 - DNA, 35 bp, Artificial Sequence; identical to SEQ ID NO: 4267
  Probe

SEQ ID NO: 46218 - DNA, 36 bp, Artificial Sequence; identical to SEQ ID NO: 4268
  Probe

SEQ ID NO: 46219 - DNA, 37 bp, Artificial Sequence; identical to SEQ ID NO: 4269
  Probe

SEQ ID NO: 46220 - DNA, 38 bp, Artificial Sequence; identical to SEQ ID NO: 4270
  Probe

SEQ ID NO: 46221 - DNA, 39 bp, Artificial Sequence; identical to SEQ ID NO: 4271
  Probe

SEQ ID NO: 46222 - DNA, 40 bp, Artificial Sequence; identical to SEQ ID NO: 4272
  Probe

SEQ ID NO: 46223 - DNA, 41 bp, Artificial Sequence; identical to SEQ ID NO: 4273
  Probe

SEQ ID NO: 46224 - DNA, 42 bp, Artificial Sequence; identical to SEQ ID NO: 4274
  Probe

SEQ ID NO: 46225 - DNA, 43 bp, Artificial Sequence; identical to SEQ ID NO: 4275
  Probe

SEQ ID NO: 46226 - DNA, 44 bp, Artificial Sequence; identical to SEQ ID NO: 4276
  Probe

SEQ ID NO: 46227 - DNA, 45 bp, Artificial Sequence; identical to SEQ ID NO: 4277
  Probe

SEQ ID NO: 46228 - DNA, 46 bp, Artificial Sequence; identical to SEQ ID NO: 4278
  Probe

SEQ ID NO: 46229 - DNA, 50 bp, Artificial Sequence; identical to SEQ ID NO: 4281
  Probe

SEQ ID NO: 46230 - DNA, 49 bp, Artificial Sequence; identical to SEQ ID NO: 4283
  Probe

SEQ ID NO: 46231 - DNA, 50 bp, Artificial Sequence; identical to SEQ ID NO: 4284
  Probe

SEQ ID NO: 46232 - DNA, 29 bp, Artificial Sequence
  Probe
cagcaacctcggttcgaatccgagtcacg

SEQ ID NO: 46233 - DNA, 30 bp, Artificial Sequence; identical to SEQ ID NO: 17915
  Probe

SEQ ID NO: 46234 - DNA, 32 bp, Artificial Sequence; identical to SEQ ID NO: 4285
  Probe

SEQ ID NO: 46235 - DNA, 34 bp, Artificial Sequence; identical to SEQ ID NO: 4286
  Probe

SEQ ID NO: 46236 - DNA, 34 bp, Artificial Sequence; identical to SEQ ID NO: 4287
  Probe

SEQ ID NO: 46237 - DNA, 35 bp, Artificial Sequence; identical to SEQ ID NO: 4288
  Probe

SEQ ID NO: 46238 - DNA, 34 bp, Artificial Sequence; identical to SEQ ID NO: 4289
  Probe

SEQ ID NO: 46239 - DNA, 35 bp, Artificial Sequence; identical to SEQ ID NO: 4290
  Probe

SEQ ID NO: 46240 - DNA, 50 bp, Artificial Sequence
  Probe
cagcactctggactctgaatccagcgatccgagttcaaatctcggtggga

SEQ ID NO: 46241 - DNA, 16 bp, Artificial Sequence
  Probe
cagcagtacatgcaga

SEQ ID NO: 46242 - DNA, 19 bp, Artificial Sequence
  Probe
cagcagtacatgcagagca

SEQ ID NO: 46243 - DNA, 20 bp, Artificial Sequence
  Probe
cagcagtacatgcagagcaa

SEQ ID NO: 46244 - DNA, 31 bp, Artificial Sequence; identical to SEQ ID NO: 529
  Probe

SEQ ID NO: 46245 - DNA, 33 bp, Artificial Sequence; identical to SEQ ID NO: 4291
  Probe

SEQ ID NO: 46246 - DNA, 34 bp, Artificial Sequence; identical to SEQ ID NO: 4292
  Probe

SEQ ID NO: 46247 - DNA, 35 bp, Artificial Sequence; identical to SEQ ID NO: 4293
  Probe

SEQ ID NO: 46248 - DNA, 33 bp, Artificial Sequence; identical to SEQ ID NO: 4294
  Probe

SEQ ID NO: 46249 - DNA, 29 bp, Artificial Sequence
  Probe
cagcgatccgagttcaaatctcggtggga

SEQ ID NO: 46250 - DNA, 31 bp, Artificial Sequence; identical to SEQ ID NO: 4296
  Probe

SEQ ID NO: 46251 - DNA, 33 bp, Artificial Sequence; identical to SEQ ID NO: 4297
  Probe

SEQ ID NO: 46252 - DNA, 35 bp, Artificial Sequence; identical to SEQ ID NO: 4298
  Probe

SEQ ID NO: 46253 - DNA, 26 bp, Artificial Sequence
  Probe
cagctaaataagctatcgggcccata

SEQ ID NO: 46254 - DNA, 27 bp, Artificial Sequence
  Probe
cagctaaataagctatcgggcccatac

SEQ ID NO: 46255 - DNA, 35 bp, Artificial Sequence; identical to SEQ ID NO: 4311
  Probe

SEQ ID NO: 46256 - DNA, 36 bp, Artificial Sequence; identical to SEQ ID NO: 4312
  Probe

SEQ ID NO: 46257 - DNA, 39 bp, Artificial Sequence; identical to SEQ ID NO: 4314
  Probe

SEQ ID NO: 46258 - DNA, 50 bp, Artificial Sequence; identical to SEQ ID NO: 532
  Probe

SEQ ID NO: 46259 - DNA, 24 bp, Artificial Sequence
  Probe
cagcttcaaacctgccggggcttc

SEQ ID NO: 46260 - DNA, 25 bp, Artificial Sequence
  Probe
cagcttcaaacctgccggggcttct

SEQ ID NO: 46261 - DNA, 26 bp, Artificial Sequence
  Probe
cagcttcaaacctgccggggcttctc

SEQ ID NO: 46262 - DNA, 28 bp, Artificial Sequence
  Probe
cagctttggggggttcgattccttcctt

SEQ ID NO: 46263 - DNA, 29 bp, Artificial Sequence
  Probe
cagctttggggggttcgattccttccttt

SEQ ID NO: 46264 - DNA, 31 bp, Artificial Sequence; identical to SEQ ID NO: 17957
  Probe

SEQ ID NO: 46265 - DNA, 32 bp, Artificial Sequence; identical to SEQ ID NO: 4333
  Probe

SEQ ID NO: 46266 - DNA, 33 bp, Artificial Sequence; identical to SEQ ID NO: 4334
  Probe

SEQ ID NO: 46267 - DNA, 34 bp, Artificial Sequence; identical to SEQ ID NO: 4335
  Probe

SEQ ID NO: 46268 - DNA, 35 bp, Artificial Sequence; identical to SEQ ID NO: 4336
  Probe

SEQ ID NO: 46269 - DNA, 36 bp, Artificial Sequence; identical to SEQ ID NO: 4337
  Probe

SEQ ID NO: 46270 - DNA, 34 bp, Artificial Sequence; identical to SEQ ID NO: 17965
  Probe

SEQ ID NO: 46271 - DNA, 34 bp, Artificial Sequence; identical to SEQ ID NO: 17968
  Probe

SEQ ID NO: 46272 - DNA, 32 bp, Artificial Sequence; identical to SEQ ID NO: 17977
  Probe

SEQ ID NO: 46273 - DNA, 33 bp, Artificial Sequence; identical to SEQ ID NO: 4339
  Probe

SEQ ID NO: 46274 - DNA, 36 bp, Artificial Sequence; identical to SEQ ID NO: 4340
  Probe

SEQ ID NO: 46275 - DNA, 21 bp, Artificial Sequence
  Probe
cagggatgggttcgattctca

SEQ ID NO: 46276 - DNA, 29 bp, Artificial Sequence
  Probe
cagggatgggttcgattctcatagtccta

SEQ ID NO: 46277 - DNA, 30 bp, Artificial Sequence; identical to SEQ ID NO: 17980
  Probe

SEQ ID NO: 46278 - DNA, 31 bp, Artificial Sequence; identical to SEQ ID NO: 4343
  Probe

SEQ ID NO: 46279 - DNA, 33 bp, Artificial Sequence; identical to SEQ ID NO: 4345
  Probe

SEQ ID NO: 46280 - DNA, 36 bp, Artificial Sequence
  Probe
cagggattgtgggttcgagtcccacctggggtgtcg

SEQ ID NO: 46281 - DNA, 29 bp, Artificial Sequence
  Probe
cagggattgtgggttcgagtcccatctgg

SEQ ID NO: 46282 - DNA, 33 bp, Artificial Sequence; identical to SEQ ID NO: 17989
  Probe

SEQ ID NO: 46283 - DNA, 33 bp, Artificial Sequence
  Probe
caggggtcgcgagttcaaatctcgctggggcct

SEQ ID NO: 46284 - DNA, 27 bp, Artificial Sequence
  Probe
caggggttaggcctctttttaccagct

SEQ ID NO: 46285 - DNA, 36 bp, Artificial Sequence; identical to SEQ ID NO: 4354
  Probe

SEQ ID NO: 46286 - DNA, 26 bp, Artificial Sequence
  Probe
caggttcgaatcctgccgactacggc

SEQ ID NO: 46287 - DNA, 27 bp, Artificial Sequence
  Probe
caggttcgaatcctgccgactacggca

SEQ ID NO: 46288 - DNA, 26 bp, Artificial Sequence
  Probe
caggttcgaatcctgccgactacgtc

SEQ ID NO: 46289 - DNA, 27 bp, Artificial Sequence
  Probe
caggttcgaatcctgccgactacgtca

SEQ ID NO: 46290 - DNA, 16 bp, Artificial Sequence
  Probe
cagtacatgcagagca

SEQ ID NO: 46291 - DNA, 23 bp, Artificial Sequence
  Probe
cagtcagaggttcaattcctctt

SEQ ID NO: 46292 - DNA, 24 bp, Artificial Sequence
  Probe
cagtcagaggttcaattcctcttc

SEQ ID NO: 46293 - DNA, 25 bp, Artificial Sequence
  Probe
cagtcagaggttcaattcctcttct

SEQ ID NO: 46294 - DNA, 26 bp, Artificial Sequence
  Probe
cagtcagaggttcaattcctcttctt

SEQ ID NO: 46295 - DNA, 27 bp, Artificial Sequence
  Probe
cagtcagaggttcaattcctcttctta

SEQ ID NO: 46296 - DNA, 28 bp, Artificial Sequence
  Probe
cagtcagaggttcaattcctcttcttaa

SEQ ID NO: 46297 - DNA, 29 bp, Artificial Sequence
  Probe
cagtcagaggttcaattcctcttcttaac

SEQ ID NO: 46298 - DNA, 30 bp, Artificial Sequence; identical to SEQ ID NO: 4358
  Probe

SEQ ID NO: 46299 - DNA, 33 bp, Artificial Sequence; identical to SEQ ID NO: 4360
  Probe

SEQ ID NO: 46300 - DNA, 16 bp, Artificial Sequence
  Probe
cagtcggtagagcatc

SEQ ID NO: 46301 - DNA, 19 bp, Artificial Sequence
  Probe
cagtcggtagagcatcaga

SEQ ID NO: 46302 - DNA, 50 bp, Artificial Sequence
  Probe
cagtctcataatctgaaggtcctgagttcgaacctcagagggggcagctg

SEQ ID NO: 46303 - DNA, 44 bp, Artificial Sequence; identical to SEQ ID NO: 4374
  Probe

SEQ ID NO: 46304 - DNA, 18 bp, Artificial Sequence
  Probe
cagtggtagaattctcgc

SEQ ID NO: 46305 - DNA, 19 bp, Artificial Sequence
  Probe
cagtggtagaattctcgcc

SEQ ID NO: 46306 - DNA, 20 bp, Artificial Sequence
  Probe
cagtggtagaattctcgcct

SEQ ID NO: 46307 - DNA, 21 bp, Artificial Sequence
  Probe
cagtggtagaattctcgcctg

SEQ ID NO: 46308 - DNA, 17 bp, Artificial Sequence
  Probe
cagttgacccgggttcg

SEQ ID NO: 46309 - DNA, 16 bp, Artificial Sequence
  Probe
cagttgatgcagagtg

SEQ ID NO: 46310 - DNA, 21 bp, Artificial Sequence
  Probe
cagttgatgcagagtggggtt

SEQ ID NO: 46311 - DNA, 25 bp, Artificial Sequence
  Probe
cagttgatgcagagtggggttttgc

SEQ ID NO: 46312 - DNA, 26 bp, Artificial Sequence
  Probe
cagttgatgcagagtggggttttgca

SEQ ID NO: 46313 - DNA, 30 bp, Artificial Sequence; identical to SEQ ID NO: 29638
  Probe

SEQ ID NO: 46314 - DNA, 32 bp, Artificial Sequence; identical to SEQ ID NO: 18036
  Probe

SEQ ID NO: 46315 - DNA, 35 bp, Artificial Sequence; identical to SEQ ID NO: 18039
  Probe

SEQ ID NO: 46316 - DNA, 36 bp, Artificial Sequence; identical to SEQ ID NO: 4381
  Probe

SEQ ID NO: 46317 - DNA, 24 bp, Artificial Sequence
  Probe
cagttgattagggtgcttagctgt

SEQ ID NO: 46318 - DNA, 40 bp, Artificial Sequence
  Probe
cagttgattagggtgcttagctgttaactaagtgtttgtg

SEQ ID NO: 46319 - DNA, 50 bp, Artificial Sequence; identical to SEQ ID NO: 538
  Probe

SEQ ID NO: 46320 - DNA, 50 bp, Artificial Sequence; identical to SEQ ID NO: 4387
  Probe

SEQ ID NO: 46321 - DNA, 43 bp, Artificial Sequence; identical to SEQ ID NO: 4391
  Probe

SEQ ID NO: 46322 - DNA, 43 bp, Artificial Sequence; identical to SEQ ID NO: 29666
  Probe

SEQ ID NO: 46323 - DNA, 50 bp, Artificial Sequence
  Probe
cataatctgaaggtcctgagttcgaacctcagagggggcagctgccattt

SEQ ID NO: 46324 - DNA, 21 bp, Artificial Sequence
  Probe
cataatctgaaggtcgtgagt

SEQ ID NO: 46325 - DNA, 40 bp, Artificial Sequence
  Probe
cataatctgaaggtcgtgagttcgatcctcacacggggca

SEQ ID NO: 46326 - DNA, 35 bp, Artificial Sequence; identical to SEQ ID NO: 4395
  Probe

SEQ ID NO: 46327 - DNA, 38 bp, Artificial Sequence
  Probe
cataccccgaaaatgttggttatacccttcccgtacta

SEQ ID NO: 46328 - DNA, 40 bp, Artificial Sequence; identical to SEQ ID NO: 4396
  Probe

SEQ ID NO: 46329 - DNA, 41 bp, Artificial Sequence; identical to SEQ ID NO: 4397
  Probe

SEQ ID NO: 46330 - DNA, 50 bp, Artificial Sequence; identical to SEQ ID NO: 38909
  Probe

SEQ ID NO: 46331 - DNA, 22 bp, Artificial Sequence
  Probe
catatcattggtcgtggttgta

SEQ ID NO: 46332 - DNA, 24 bp, Artificial Sequence
  Probe
catatcattggtcgtggttgtagt

SEQ ID NO: 46333 - DNA, 26 bp, Artificial Sequence
  Probe
catatcattggtcgtggttgtagtcc

SEQ ID NO: 46334 - DNA, 28 bp, Artificial Sequence
  Probe
catatcattggtcgtggttgtagtccgt

SEQ ID NO: 46335 - DNA, 34 bp, Artificial Sequence; identical to SEQ ID NO: 29681
  Probe

SEQ ID NO: 46336 - DNA, 37 bp, Artificial Sequence
  Probe
catatcattggtcgtggttgtagtccgtgcgagaata

SEQ ID NO: 46337 - DNA, 39 bp, Artificial Sequence; identical to SEQ ID NO: 4401
  Probe

SEQ ID NO: 46338 - DNA, 40 bp, Artificial Sequence; identical to SEQ ID NO: 18062
  Probe

SEQ ID NO: 46339 - DNA, 28 bp, Artificial Sequence
  Probe
catattgaattgcaaattcgaagaagca

SEQ ID NO: 46340 - DNA, 46 bp, Artificial Sequence
  Probe
catattgaattgcaaattcgaagaagcagcttcaaacctgccgggg

SEQ ID NO: 46341 - DNA, 50 bp, Artificial Sequence; identical to SEQ ID NO: 4406
  Probe

SEQ ID NO: 46342 - DNA, 16 bp, Artificial Sequence
  Probe
catcaccccataaaca

SEQ ID NO: 46343 - DNA, 17 bp, Artificial Sequence
  Probe
catcaccccataaacaa

SEQ ID NO: 46344 - DNA, 18 bp, Artificial Sequence
  Probe
catcaccccataaacaaa

SEQ ID NO: 46345 - DNA, 19 bp, Artificial Sequence
  Probe
catcaccccataaacaaat

SEQ ID NO: 46346 - DNA, 50 bp, Artificial Sequence; identical to SEQ ID NO: 4419
  Probe

SEQ ID NO: 46347 - DNA, 40 bp, Artificial Sequence; identical to SEQ ID NO: 4420
  Probe

SEQ ID NO: 46348 - DNA, 37 bp, Artificial Sequence; identical to SEQ ID NO: 4421
  Probe

SEQ ID NO: 46349 - DNA, 18 bp, Artificial Sequence
  Probe
catgcccccatgtctaac

SEQ ID NO: 46350 - DNA, 19 bp, Artificial Sequence
  Probe
catgcccccatgtctaaca

SEQ ID NO: 46351 - DNA, 22 bp, Artificial Sequence
  Probe
catgcccccatgtctaacaaca

SEQ ID NO: 46352 - DNA, 23 bp, Artificial Sequence
  Probe
catgcccccatgtctaacaacat

SEQ ID NO: 46353 - DNA, 27 bp, Artificial Sequence
  Probe
catgcccccatgtctaacaacatggct

SEQ ID NO: 46354 - DNA, 28 bp, Artificial Sequence
  Probe
catgcccccatgtctaacaacatggctt

SEQ ID NO: 46355 - DNA, 29 bp, Artificial Sequence
  Probe
catgcccccatgtctaacaacatggcttt

SEQ ID NO: 46356 - DNA, 30 bp, Artificial Sequence; identical to SEQ ID NO: 4433
  Probe

SEQ ID NO: 46357 - DNA, 31 bp, Artificial Sequence; identical to SEQ ID NO: 4434
  Probe

SEQ ID NO: 46358 - DNA, 32 bp, Artificial Sequence; identical to SEQ ID NO: 4435
  Probe

SEQ ID NO: 46359 - DNA, 33 bp, Artificial Sequence; identical to SEQ ID NO: 4436
  Probe

SEQ ID NO: 46360 - DNA, 34 bp, Artificial Sequence; identical to SEQ ID NO: 4437
  Probe

SEQ ID NO: 46361 - DNA, 35 bp, Artificial Sequence; identical to SEQ ID NO: 4438
  Probe

SEQ ID NO: 46362 - DNA, 36 bp, Artificial Sequence; identical to SEQ ID NO: 4439
  Probe

SEQ ID NO: 46363 - DNA, 23 bp, Artificial Sequence
  Probe
catggccaacctcctactcctca

SEQ ID NO: 46364 - DNA, 33 bp, Artificial Sequence; identical to SEQ ID NO: 542
  Probe

SEQ ID NO: 46365 - DNA, 28 bp, Artificial Sequence
  Probe
catgtctaacaacatggctttctcaact

SEQ ID NO: 46366 - DNA, 26 bp, Artificial Sequence
  Probe
catgttaacgttttcttccagctcca

SEQ ID NO: 46367 - DNA, 27 bp, Artificial Sequence
  Probe
cattaaattatgataatcatatttacc

SEQ ID NO: 46368 - DNA, 32 bp, Artificial Sequence; identical to SEQ ID NO: 4447
  Probe

SEQ ID NO: 46369 - DNA, 20 bp, Artificial Sequence
  Probe
cattcttgcgacccgggttc

SEQ ID NO: 46370 - DNA, 37 bp, Artificial Sequence; identical to SEQ ID NO: 4449
  Probe

SEQ ID NO: 46371 - DNA, 38 bp, Artificial Sequence; identical to SEQ ID NO: 18118
  Probe

SEQ ID NO: 46372 - DNA, 39 bp, Artificial Sequence; identical to SEQ ID NO: 4450
  Probe

SEQ ID NO: 46373 - DNA, 40 bp, Artificial Sequence; identical to SEQ ID NO: 4451
  Probe

SEQ ID NO: 46374 - DNA, 41 bp, Artificial Sequence; identical to SEQ ID NO: 4452
  Probe

SEQ ID NO: 46375 - DNA, 42 bp, Artificial Sequence
  Probe
cattcttgcgacccgggttcgattcccgggcggcgcacttag

SEQ ID NO: 46376 - DNA, 38 bp, Artificial Sequence
  Probe
cattcttgcgacccgggttcgattcccgggcggcgcat

SEQ ID NO: 46377 - DNA, 39 bp, Artificial Sequence; identical to SEQ ID NO: 4454
  Probe

SEQ ID NO: 46378 - DNA, 40 bp, Artificial Sequence; identical to SEQ ID NO: 4455
  Probe

SEQ ID NO: 46379 - DNA, 50 bp, Artificial Sequence; identical to SEQ ID NO: 4456
  Probe

SEQ ID NO: 46380 - DNA, 20 bp, Artificial Sequence
  Probe
cattggtcgtggttgtagtc

SEQ ID NO: 46381 - DNA, 21 bp, Artificial Sequence
  Probe
cattggtcgtggttgtagtcc

SEQ ID NO: 46382 - DNA, 25 bp, Artificial Sequence
  Probe
cattggtcgtggttgtagtccgtgc

SEQ ID NO: 46383 - DNA, 27 bp, Artificial Sequence
  Probe
cattggtcgtggttgtagtccgtgcga

SEQ ID NO: 46384 - DNA, 31 bp, Artificial Sequence; identical to SEQ ID NO: 18131
  Probe

SEQ ID NO: 46385 - DNA, 35 bp, Artificial Sequence; identical to SEQ ID NO: 4461
  Probe

SEQ ID NO: 46386 - DNA, 50 bp, Artificial Sequence
  Probe
cattggtcttaggccccaaaaattttggtgcaactccaaataaaagtaat

SEQ ID NO: 46387 - DNA, 26 bp, Artificial Sequence
  Probe
cattggtggttcagtggtagaattct

SEQ ID NO: 46388 - DNA, 28 bp, Artificial Sequence
  Probe
cattggtggttcagtggtagaattctcg

SEQ ID NO: 46389 - DNA, 30 bp, Artificial Sequence; identical to SEQ ID NO: 4462
  Probe

SEQ ID NO: 46390 - DNA, 31 bp, Artificial Sequence; identical to SEQ ID NO: 4463
  Probe

SEQ ID NO: 46391 - DNA, 32 bp, Artificial Sequence; identical to SEQ ID NO: 4464
  Probe

SEQ ID NO: 46392 - DNA, 40 bp, Artificial Sequence; identical to SEQ ID NO: 18142
  Probe

SEQ ID NO: 46393 - DNA, 27 bp, Artificial Sequence
  Probe
ccaaaaattttggtgcaactccaaata

SEQ ID NO: 46394 - DNA, 36 bp, Artificial Sequence
  Probe
ccaaaaattttggtgcaactccaaataaaagtaata

SEQ ID NO: 46395 - DNA, 27 bp, Artificial Sequence
  Probe
ccaaaacatcagattgtgaatctgaca

SEQ ID NO: 46396 - DNA, 28 bp, Artificial Sequence
  Probe
ccaaaacatcagattgtgaatctgacaa

SEQ ID NO: 46397 - DNA, 29 bp, Artificial Sequence
  Probe
ccaaaacatcagattgtgaatctgacaac

SEQ ID NO: 46398 - DNA, 30 bp, Artificial Sequence; identical to SEQ ID NO: 4473
  Probe

SEQ ID NO: 46399 - DNA, 31 bp, Artificial Sequence; identical to SEQ ID NO: 4474
  Probe

SEQ ID NO: 46400 - DNA, 32 bp, Artificial Sequence; identical to SEQ ID NO: 4475
  Probe

SEQ ID NO: 46401 - DNA, 33 bp, Artificial Sequence; identical to SEQ ID NO: 4476
  Probe

SEQ ID NO: 46402 - DNA, 35 bp, Artificial Sequence; identical to SEQ ID NO: 4478
  Probe

SEQ ID NO: 46403 - DNA, 36 bp, Artificial Sequence; identical to SEQ ID NO: 4479
  Probe

SEQ ID NO: 46404 - DNA, 44 bp, Artificial Sequence; identical to SEQ ID NO: 556
  Probe

SEQ ID NO: 46405 - DNA, 45 bp, Artificial Sequence; identical to SEQ ID NO: 557
  Probe

SEQ ID NO: 46406 - DNA, 50 bp, Artificial Sequence; identical to SEQ ID NO: 4482
  Probe

SEQ ID NO: 46407 - DNA, 17 bp, Artificial Sequence
  Probe
ccaaacccactccacct

SEQ ID NO: 46408 - DNA, 29 bp, Artificial Sequence
  Probe
ccaaagacaccccccacagtttatgtagc

SEQ ID NO: 46409 - DNA, 30 bp, Artificial Sequence; identical to SEQ ID NO: 18159
  Probe

SEQ ID NO: 46410 - DNA, 35 bp, Artificial Sequence; identical to SEQ ID NO: 18164
  Probe

SEQ ID NO: 46411 - DNA, 38 bp, Artificial Sequence; identical to SEQ ID NO: 18167
  Probe

SEQ ID NO: 46412 - DNA, 50 bp, Artificial Sequence; identical to SEQ ID NO: 4485
  Probe

SEQ ID NO: 46413 - DNA, 20 bp, Artificial Sequence
  Probe
ccaacacctctttacagtga

SEQ ID NO: 46414 - DNA, 21 bp, Artificial Sequence
  Probe
ccaacacctctttacagtgaa

SEQ ID NO: 46415 - DNA, 22 bp, Artificial Sequence
  Probe
ccaacacctctttacagtgaaa

SEQ ID NO: 46416 - DNA, 23 bp, Artificial Sequence
  Probe
ccaacacctctttacagtgaaat

SEQ ID NO: 46417 - DNA, 23 bp, Artificial Sequence
  Probe
ccaactaaatactaccgtatggc

SEQ ID NO: 46418 - DNA, 17 bp, Artificial Sequence
  Probe
ccaacttacacttagga

SEQ ID NO: 46419 - DNA, 18 bp, Artificial Sequence
  Probe
ccaacttacacttaggag

SEQ ID NO: 46420 - DNA, 19 bp, Artificial Sequence
  Probe
ccaacttacacttaggaga

SEQ ID NO: 46421 - DNA, 20 bp, Artificial Sequence
  Probe
ccaacttacacttaggagat

SEQ ID NO: 46422 - DNA, 29 bp, Artificial Sequence
  Probe
ccaacttacacttaggagatttcaactta

SEQ ID NO: 46423 - DNA, 32 bp, Artificial Sequence
  Probe
ccaacttacacttaggagatttcaacttaact

SEQ ID NO: 46424 - DNA, 36 bp, Artificial Sequence; identical to SEQ ID NO: 4501
  Probe

SEQ ID NO: 46425 - DNA, 38 bp, Artificial Sequence; identical to SEQ ID NO: 4502
  Probe

SEQ ID NO: 46426 - DNA, 39 bp, Artificial Sequence; identical to SEQ ID NO: 4503
  Probe

SEQ ID NO: 46427 - DNA, 40 bp, Artificial Sequence
  Probe
ccaacttacacttaggagatttcaacttaacttgaccgct

SEQ ID NO: 46428 - DNA, 43 bp, Artificial Sequence; identical to SEQ ID NO: 4504
  Probe

SEQ ID NO: 46429 - DNA, 44 bp, Artificial Sequence; identical to SEQ ID NO: 4505
  Probe

SEQ ID NO: 46430 - DNA, 45 bp, Artificial Sequence; identical to SEQ ID NO: 4506
  Probe

SEQ ID NO: 46431 - DNA, 46 bp, Artificial Sequence; identical to SEQ ID NO: 4507
  Probe

SEQ ID NO: 46432 - DNA, 48 bp, Artificial Sequence; identical to SEQ ID NO: 4508
  Probe

SEQ ID NO: 46433 - DNA, 49 bp, Artificial Sequence; identical to SEQ ID NO: 4509
  Probe

SEQ ID NO: 46434 - DNA, 50 bp, Artificial Sequence; identical to SEQ ID NO: 4510
  Probe

SEQ ID NO: 46435 - DNA, 16 bp, Artificial Sequence
  Probe
ccaagcagttgacccg

SEQ ID NO: 46436 - DNA, 32 bp, Artificial Sequence
  Probe
ccaagcagttgacccgggttcgattcccggcc

SEQ ID NO: 46437 - DNA, 33 bp, Artificial Sequence
  Probe
ccaagcagttgacccgggttcgattcccggcca

SEQ ID NO: 46438 - DNA, 41 bp, Artificial Sequence; identical to SEQ ID NO: 18192
  Probe

SEQ ID NO: 46439 - DNA, 41 bp, Artificial Sequence; identical to SEQ ID NO: 18195
  Probe

SEQ ID NO: 46440 - DNA, 30 bp, Artificial Sequence; identical to SEQ ID NO: 18198
  Probe

SEQ ID NO: 46441 - DNA, 31 bp, Artificial Sequence; identical to SEQ ID NO: 18199
  Probe

SEQ ID NO: 46442 - DNA, 33 bp, Artificial Sequence; identical to SEQ ID NO: 18200
  Probe

SEQ ID NO: 46443 - DNA, 36 bp, Artificial Sequence; identical to SEQ ID NO: 4515
  Probe

SEQ ID NO: 46444 - DNA, 36 bp, Artificial Sequence; identical to SEQ ID NO: 4516
  Probe

SEQ ID NO: 46445 - DNA, 38 bp, Artificial Sequence; identical to SEQ ID NO: 4520
  Probe

SEQ ID NO: 46446 - DNA, 39 bp, Artificial Sequence; identical to SEQ ID NO: 4521
  Probe

SEQ ID NO: 46447 - DNA, 40 bp, Artificial Sequence; identical to SEQ ID NO: 4522
  Probe

SEQ ID NO: 46448 - DNA, 19 bp, Artificial Sequence
  Probe
ccacacccacccaagaaca

SEQ ID NO: 46449 - DNA, 26 bp, Artificial Sequence
  Probe
ccacacccacccaagaacagggtttg

SEQ ID NO: 46450 - DNA, 27 bp, Artificial Sequence
  Probe
ccacacccacccaagaacagggtttgt

SEQ ID NO: 46451 - DNA, 28 bp, Artificial Sequence
  Probe
ccacacccacccaagaacagggtttgtt

SEQ ID NO: 46452 - DNA, 29 bp, Artificial Sequence
  Probe
ccacacccacccaagaacagggtttgtta

SEQ ID NO: 46453 - DNA, 25 bp, Artificial Sequence
  Probe
ccacacctcagaaggtctcactttt

SEQ ID NO: 46454 - DNA, 32 bp, Artificial Sequence; identical to SEQ ID NO: 564
  Probe

SEQ ID NO: 46455 - DNA, 16 bp, Artificial Sequence
  Probe
ccacccaagaacaggg

SEQ ID NO: 46456 - DNA, 23 bp, Artificial Sequence
  Probe
ccacccaagaacagggtttgtta

SEQ ID NO: 46457 - DNA, 20 bp, Artificial Sequence
  Probe
ccacgcgggaggcccgggtt

SEQ ID NO: 46458 - DNA, 22 bp, Artificial Sequence
  Probe
ccacgcgggaggcccgggttcg

SEQ ID NO: 46459 - DNA, 38 bp, Artificial Sequence; identical to SEQ ID NO: 18234
  Probe

SEQ ID NO: 46460 - DNA, 41 bp, Artificial Sequence; identical to SEQ ID NO: 18235
  Probe

SEQ ID NO: 46461 - DNA, 41 bp, Artificial Sequence; identical to SEQ ID NO: 4531
  Probe

SEQ ID NO: 46462 - DNA, 41 bp, Artificial Sequence
  Probe
ccacgcgggaggcccgggttcgattcccggccaatgcactt

SEQ ID NO: 46463 - DNA, 41 bp, Artificial Sequence; identical to SEQ ID NO: 4532
  Probe

SEQ ID NO: 46464 - DNA, 48 bp, Artificial Sequence
  Probe
ccacgcgggaggcccgggttcgattcccggccaatgcagcagcagacc

SEQ ID NO: 46465 - DNA, 50 bp, Artificial Sequence
  Probe
ccacgcgggaggcccgggttcgattcccggccaatgcagcagcagacctt

SEQ ID NO: 46466 - DNA, 48 bp, Artificial Sequence
  Probe
ccacgcgggaggcccgggttcgattcccggccaatgcagcagctgaaa

SEQ ID NO: 46467 - DNA, 50 bp, Artificial Sequence
  Probe
ccacgcgggaggcccgggttcgattcccggccaatgcagcagctgaaagc

SEQ ID NO: 46468 - DNA, 38 bp, Artificial Sequence
  Probe
ccacgcgggaggcccgggttcgattcccggcccatgca

SEQ ID NO: 46469 - DNA, 41 bp, Artificial Sequence; identical to SEQ ID NO: 4534
  Probe

SEQ ID NO: 46470 - DNA, 20 bp, Artificial Sequence
  Probe
ccacttctgacacatacttt

SEQ ID NO: 46471 - DNA, 27 bp, Artificial Sequence
  Probe
ccacttctgacagagctcaattacttt

SEQ ID NO: 46472 - DNA, 23 bp, Artificial Sequence
  Probe
ccagaggtcgatggatcgaaacc

SEQ ID NO: 46473 - DNA, 33 bp, Artificial Sequence
  Probe
ccagaggtcgatggatcgaaaccatcctctgct

SEQ ID NO: 46474 - DNA, 32 bp, Artificial Sequence
  Probe
ccagagtgtagcttaacacaaagcacccaact

SEQ ID NO: 46475 - DNA, 43 bp, Artificial Sequence
  Probe
ccagagtgtagcttaacacaaagcacccaacttacacttagga

SEQ ID NO: 46476 - DNA, 44 bp, Artificial Sequence; identical to SEQ ID NO: 4546
  Probe

SEQ ID NO: 46477 - DNA, 45 bp, Artificial Sequence; identical to SEQ ID NO: 4547
  Probe

SEQ ID NO: 46478 - DNA, 46 bp, Artificial Sequence; identical to SEQ ID NO: 4548
  Probe

SEQ ID NO: 46479 - DNA, 32 bp, Artificial Sequence; identical to SEQ ID NO: 4550
  Probe

SEQ ID NO: 46480 - DNA, 34 bp, Artificial Sequence; identical to SEQ ID NO: 18248
  Probe

SEQ ID NO: 46481 - DNA, 35 bp, Artificial Sequence; identical to SEQ ID NO: 18249
  Probe

SEQ ID NO: 46482 - DNA, 36 bp, Artificial Sequence; identical to SEQ ID NO: 4552
  Probe

SEQ ID NO: 46483 - DNA, 34 bp, Artificial Sequence; identical to SEQ ID NO: 18251
  Probe

SEQ ID NO: 46484 - DNA, 30 bp, Artificial Sequence; identical to SEQ ID NO: 18252
  Probe

SEQ ID NO: 46485 - DNA, 31 bp, Artificial Sequence; identical to SEQ ID NO: 18253
  Probe

SEQ ID NO: 46486 - DNA, 32 bp, Artificial Sequence; identical to SEQ ID NO: 4553
  Probe

SEQ ID NO: 46487 - DNA, 34 bp, Artificial Sequence; identical to SEQ ID NO: 18255
  Probe

SEQ ID NO: 46488 - DNA, 36 bp, Artificial Sequence; identical to SEQ ID NO: 4554
  Probe

SEQ ID NO: 46489 - DNA, 29 bp, Artificial Sequence
  Probe
ccagcggtgcctcaaccgagcgtccaagc

SEQ ID NO: 46490 - DNA, 17 bp, Artificial Sequence
  Probe
ccagctttggggggttc

SEQ ID NO: 46491 - DNA, 18 bp, Artificial Sequence
  Probe
ccagctttggggggttcg

SEQ ID NO: 46492 - DNA, 29 bp, Artificial Sequence
  Probe
ccagctttggggggttcgattccttcctt

SEQ ID NO: 46493 - DNA, 32 bp, Artificial Sequence; identical to SEQ ID NO: 4557
  Probe

SEQ ID NO: 46494 - DNA, 33 bp, Artificial Sequence; identical to SEQ ID NO: 18265
  Probe

SEQ ID NO: 46495 - DNA, 34 bp, Artificial Sequence; identical to SEQ ID NO: 18266
  Probe

SEQ ID NO: 46496 - DNA, 35 bp, Artificial Sequence; identical to SEQ ID NO: 4558
  Probe

SEQ ID NO: 46497 - DNA, 36 bp, Artificial Sequence; identical to SEQ ID NO: 4559
  Probe

SEQ ID NO: 46498 - DNA, 37 bp, Artificial Sequence; identical to SEQ ID NO: 4560
  Probe

SEQ ID NO: 46499 - DNA, 38 bp, Artificial Sequence; identical to SEQ ID NO: 18270
  Probe

SEQ ID NO: 46500 - DNA, 31 bp, Artificial Sequence; identical to SEQ ID NO: 4561
  Probe

SEQ ID NO: 46501 - DNA, 33 bp, Artificial Sequence; identical to SEQ ID NO: 18272
  Probe

SEQ ID NO: 46502 - DNA, 34 bp, Artificial Sequence; identical to SEQ ID NO: 4562
  Probe

SEQ ID NO: 46503 - DNA, 37 bp, Artificial Sequence; identical to SEQ ID NO: 4563
  Probe

SEQ ID NO: 46504 - DNA, 27 bp, Artificial Sequence
  Probe
ccagggattgtgggttcgagtcccatc

SEQ ID NO: 46505 - DNA, 32 bp, Artificial Sequence
  Probe
ccagggattgtgggttcgagtcccatctgggg

SEQ ID NO: 46506 - DNA, 34 bp, Artificial Sequence; identical to SEQ ID NO: 18275
  Probe

SEQ ID NO: 46507 - DNA, 31 bp, Artificial Sequence; identical to SEQ ID NO: 4569
  Probe

SEQ ID NO: 46508 - DNA, 33 bp, Artificial Sequence; identical to SEQ ID NO: 4570
  Probe

SEQ ID NO: 46509 - DNA, 27 bp, Artificial Sequence
  Probe
ccagggttcaagtccctgttcgggcgg

SEQ ID NO: 46510 - DNA, 29 bp, Artificial Sequence
  Probe
ccagggttcaagtccctgttcgggcggca

SEQ ID NO: 46511 - DNA, 27 bp, Artificial Sequence
  Probe
ccagggttcaagtccctgttcgggcgt

SEQ ID NO: 46512 - DNA, 32 bp, Artificial Sequence; identical to SEQ ID NO: 38992
  Probe

SEQ ID NO: 46513 - DNA, 33 bp, Artificial Sequence; identical to SEQ ID NO: 12926
  Probe

SEQ ID NO: 46514 - DNA, 37 bp, Artificial Sequence; identical to SEQ ID NO: 4571
  Probe

SEQ ID NO: 46515 - DNA, 45 bp, Artificial Sequence; identical to SEQ ID NO: 4572
  Probe

SEQ ID NO: 46516 - DNA, 45 bp, Artificial Sequence; identical to SEQ ID NO: 4573
  Probe

SEQ ID NO: 46517 - DNA, 41 bp, Artificial Sequence
  Probe
ccagttgattagggtgcttagctgttaactaagtgtttgtg

SEQ ID NO: 46518 - DNA, 49 bp, Artificial Sequence
  Probe
ccagttgattagggtgcttagctgttaactaagtgtttgtgggtttaag

SEQ ID NO: 46519 - DNA, 44 bp, Artificial Sequence; identical to SEQ ID NO: 4575
  Probe

SEQ ID NO: 46520 - DNA, 34 bp, Artificial Sequence
  Probe
ccataccccgaaaatgttggttatacccttcccg

SEQ ID NO: 46521 - DNA, 36 bp, Artificial Sequence; identical to SEQ ID NO: 18297
  Probe

SEQ ID NO: 46522 - DNA, 37 bp, Artificial Sequence
  Probe
ccataccccgaaaatgttggttatacccttcccgtac

SEQ ID NO: 46523 - DNA, 39 bp, Artificial Sequence; identical to SEQ ID NO: 18299
  Probe

SEQ ID NO: 46524 - DNA, 41 bp, Artificial Sequence; identical to SEQ ID NO: 4577
  Probe

SEQ ID NO: 46525 - DNA, 42 bp, Artificial Sequence; identical to SEQ ID NO: 4578
  Probe

SEQ ID NO: 46526 - DNA, 27 bp, Artificial Sequence
  Probe
ccatagtgtagtggttatcacgtctgc

SEQ ID NO: 46527 - DNA, 26 bp, Artificial Sequence
  Probe
ccatgcacactactataaccacccta

SEQ ID NO: 46528 - DNA, 50 bp, Artificial Sequence; identical to SEQ ID NO: 4583
  Probe

SEQ ID NO: 46529 - DNA, 40 bp, Artificial Sequence; identical to SEQ ID NO: 4586
  Probe

SEQ ID NO: 46530 - DNA, 41 bp, Artificial Sequence; identical to SEQ ID NO: 4587
  Probe

SEQ ID NO: 46531 - DNA, 19 bp, Artificial Sequence
  Probe
ccattggtcttaggcccca

SEQ ID NO: 46532 - DNA, 50 bp, Artificial Sequence; identical to SEQ ID NO: 29872
  Probe

SEQ ID NO: 46533 - DNA, 41 bp, Artificial Sequence; identical to SEQ ID NO: 18319
  Probe

SEQ ID NO: 46534 - DNA, 28 bp, Artificial Sequence
  Probe
cccaaaaattttggtgcaactccaaata

SEQ ID NO: 46535 - DNA, 37 bp, Artificial Sequence; identical to SEQ ID NO: 4594
  Probe

SEQ ID NO: 46536 - DNA, 17 bp, Artificial Sequence
  Probe
cccaaacccactccacc

SEQ ID NO: 46537 - DNA, 18 bp, Artificial Sequence
  Probe
cccaaacccactccacct

SEQ ID NO: 46538 - DNA, 39 bp, Artificial Sequence; identical to SEQ ID NO: 18332
  Probe

SEQ ID NO: 46539 - DNA, 24 bp, Artificial Sequence
  Probe
cccaactaaatactaccgtatggc

SEQ ID NO: 46540 - DNA, 16 bp, Artificial Sequence
  Probe
cccaacttacacttag

SEQ ID NO: 46541 - DNA, 17 bp, Artificial Sequence
  Probe
cccaacttacacttagg

SEQ ID NO: 46542 - DNA, 18 bp, Artificial Sequence
  Probe
cccaacttacacttagga

SEQ ID NO: 46543 - DNA, 19 bp, Artificial Sequence
  Probe
cccaacttacacttaggag

SEQ ID NO: 46544 - DNA, 20 bp, Artificial Sequence
  Probe
cccaacttacacttaggaga

SEQ ID NO: 46545 - DNA, 21 bp, Artificial Sequence
  Probe
cccaacttacacttaggagat

SEQ ID NO: 46546 - DNA, 22 bp, Artificial Sequence
  Probe
cccaacttacacttaggagatt

SEQ ID NO: 46547 - DNA, 25 bp, Artificial Sequence
  Probe
cccaacttacacttaggagatttca

SEQ ID NO: 46548 - DNA, 27 bp, Artificial Sequence
  Probe
cccaacttacacttaggagatttcaac

SEQ ID NO: 46549 - DNA, 30 bp, Artificial Sequence; identical to SEQ ID NO: 18345
  Probe

SEQ ID NO: 46550 - DNA, 33 bp, Artificial Sequence
  Probe
cccaacttacacttaggagatttcaacttaact

SEQ ID NO: 46551 - DNA, 35 bp, Artificial Sequence; identical to SEQ ID NO: 29879
  Probe

SEQ ID NO: 46552 - DNA, 37 bp, Artificial Sequence
  Probe
cccaacttacacttaggagatttcaacttaacttgac

SEQ ID NO: 46553 - DNA, 38 bp, Artificial Sequence
  Probe
cccaacttacacttaggagatttcaacttaacttgacc

SEQ ID NO: 46554 - DNA, 39 bp, Artificial Sequence; identical to SEQ ID NO: 4606
  Probe

SEQ ID NO: 46555 - DNA, 40 bp, Artificial Sequence; identical to SEQ ID NO: 4607
  Probe

SEQ ID NO: 46556 - DNA, 41 bp, Artificial Sequence
  Probe
cccaacttacacttaggagatttcaacttaacttgaccgct

SEQ ID NO: 46557 - DNA, 44 bp, Artificial Sequence; identical to SEQ ID NO: 4608
  Probe

SEQ ID NO: 46558 - DNA, 45 bp, Artificial Sequence; identical to SEQ ID NO: 4609
  Probe

SEQ ID NO: 46559 - DNA, 46 bp, Artificial Sequence; identical to SEQ ID NO: 4610
  Probe

SEQ ID NO: 46560 - DNA, 48 bp, Artificial Sequence; identical to SEQ ID NO: 4611
  Probe

SEQ ID NO: 46561 - DNA, 49 bp, Artificial Sequence; identical to SEQ ID NO: 4612
  Probe

SEQ ID NO: 46562 - DNA, 50 bp, Artificial Sequence; identical to SEQ ID NO: 4613
  Probe

SEQ ID NO: 46563 - DNA, 20 bp, Artificial Sequence
  Probe
cccaagaacagggtttgtta

SEQ ID NO: 46564 - DNA, 20 bp, Artificial Sequence
  Probe
cccacacccacccaagaaca

SEQ ID NO: 46565 - DNA, 26 bp, Artificial Sequence
  Probe
cccacacccacccaagaacagggttt

SEQ ID NO: 46566 - DNA, 27 bp, Artificial Sequence
  Probe
cccacacccacccaagaacagggtttg

SEQ ID NO: 46567 - DNA, 29 bp, Artificial Sequence
  Probe
cccacacccacccaagaacagggtttgtt

SEQ ID NO: 46568 - DNA, 30 bp, Artificial Sequence; identical to SEQ ID NO: 4619
  Probe

SEQ ID NO: 46569 - DNA, 33 bp, Artificial Sequence; identical to SEQ ID NO: 18359
  Probe

SEQ ID NO: 46570 - DNA, 22 bp, Artificial Sequence
  Probe
cccacatggtctagcggttagg

SEQ ID NO: 46571 - DNA, 28 bp, Artificial Sequence
  Probe
cccacatggtctagcggttaggattcct

SEQ ID NO: 46572 - DNA, 31 bp, Artificial Sequence; identical to SEQ ID NO: 18367
  Probe

SEQ ID NO: 46573 - DNA, 35 bp, Artificial Sequence; identical to SEQ ID NO: 583
  Probe

SEQ ID NO: 46574 - DNA, 18 bp, Artificial Sequence
  Probe
cccacccaagaacagggt

SEQ ID NO: 46575 - DNA, 20 bp, Artificial Sequence
  Probe
cccacccaagaacagggttt

SEQ ID NO: 46576 - DNA, 23 bp, Artificial Sequence
  Probe
cccacccaagaacagggtttgtt

SEQ ID NO: 46577 - DNA, 24 bp, Artificial Sequence
  Probe
cccacccaagaacagggtttgtta

SEQ ID NO: 46578 - DNA, 16 bp, Artificial Sequence
  Probe
cccacccagggacgcc

SEQ ID NO: 46579 - DNA, 26 bp, Artificial Sequence
  Probe
cccacccagggacgcgtggtgacttt

SEQ ID NO: 46580 - DNA, 27 bp, Artificial Sequence
  Probe
cccacccagggacgcgtggtgactttt

SEQ ID NO: 46581 - DNA, 26 bp, Artificial Sequence
  Probe
cccacttctgacacaactatcttatt

SEQ ID NO: 46582 - DNA, 28 bp, Artificial Sequence
  Probe
cccacttctgacagagctcaattacttt

SEQ ID NO: 46583 - DNA, 50 bp, Artificial Sequence
  Probe
cccagaggtcgatggatcgaaaccatcctctgctatagactcccttttct

SEQ ID NO: 46584 - DNA, 33 bp, Artificial Sequence; identical to SEQ ID NO: 12940
  Probe

SEQ ID NO: 46585 - DNA, 35 bp, Artificial Sequence; identical to SEQ ID NO: 18398
  Probe

SEQ ID NO: 46586 - DNA, 34 bp, Artificial Sequence; identical to SEQ ID NO: 18404
  Probe

SEQ ID NO: 46587 - DNA, 34 bp, Artificial Sequence; identical to SEQ ID NO: 36443
  Probe

SEQ ID NO: 46588 - DNA, 35 bp, Artificial Sequence; identical to SEQ ID NO: 36444
  Probe

SEQ ID NO: 46589 - DNA, 38 bp, Artificial Sequence; identical to SEQ ID NO: 18407
  Probe

SEQ ID NO: 46590 - DNA, 19 bp, Artificial Sequence
  Probe
cccataacccagaggtcga

SEQ ID NO: 46591 - DNA, 32 bp, Artificial Sequence
  Probe
cccataacccagaggtcgatggatcgaaacca

SEQ ID NO: 46592 - DNA, 45 bp, Artificial Sequence; identical to SEQ ID NO: 18409
  Probe

SEQ ID NO: 46593 - DNA, 44 bp, Artificial Sequence
  Probe
cccataacccagaggtcgatggatcgaaaccatcctctgctatc

SEQ ID NO: 46594 - DNA, 20 bp, Artificial Sequence
  Probe
cccataccccgaaaatgttg

SEQ ID NO: 46595 - DNA, 35 bp, Artificial Sequence
  Probe
cccataccccgaaaatgttggttatacccttcccg

SEQ ID NO: 46596 - DNA, 36 bp, Artificial Sequence; identical to SEQ ID NO: 18411
  Probe

SEQ ID NO: 46597 - DNA, 41 bp, Artificial Sequence; identical to SEQ ID NO: 4642
  Probe

SEQ ID NO: 46598 - DNA, 42 bp, Artificial Sequence; identical to SEQ ID NO: 4643
  Probe

SEQ ID NO: 46599 - DNA, 43 bp, Artificial Sequence; identical to SEQ ID NO: 4644
  Probe

SEQ ID NO: 46600 - DNA, 50 bp, Artificial Sequence
  Probe
cccataccccgaaaatgttggttatacccttcccgtactaattaatcccc

SEQ ID NO: 46601 - DNA, 30 bp, Artificial Sequence; identical to SEQ ID NO: 9682
  Probe

SEQ ID NO: 46602 - DNA, 33 bp, Artificial Sequence; identical to SEQ ID NO: 4645
  Probe

SEQ ID NO: 46603 - DNA, 34 bp, Artificial Sequence; identical to SEQ ID NO: 591
  Probe

SEQ ID NO: 46604 - DNA, 35 bp, Artificial Sequence; identical to SEQ ID NO: 592
  Probe

SEQ ID NO: 46605 - DNA, 25 bp, Artificial Sequence
  Probe
cccatctggggtggcctgtgacttt

SEQ ID NO: 46606 - DNA, 16 bp, Artificial Sequence
  Probe
cccatgtctaacaaca

SEQ ID NO: 46607 - DNA, 29 bp, Artificial Sequence
  Probe
cccatgtctaacaacatggctttctcaac

SEQ ID NO: 46608 - DNA, 30 bp, Artificial Sequence; identical to SEQ ID NO: 4650
  Probe

SEQ ID NO: 46609 - DNA, 21 bp, Artificial Sequence
  Probe
cccattcttgcgacccgggtt

SEQ ID NO: 46610 - DNA, 22 bp, Artificial Sequence
  Probe
cccattcttgcgacccgggttc

SEQ ID NO: 46611 - DNA, 24 bp, Artificial Sequence
  Probe
cccattcttgcgacccgggttcga

SEQ ID NO: 46612 - DNA, 25 bp, Artificial Sequence
  Probe
cccattcttgcgacccgggttcgat

SEQ ID NO: 46613 - DNA, 35 bp, Artificial Sequence; identical to SEQ ID NO: 598
  Probe

SEQ ID NO: 46614 - DNA, 36 bp, Artificial Sequence; identical to SEQ ID NO: 4652
  Probe

SEQ ID NO: 46615 - DNA, 38 bp, Artificial Sequence; identical to SEQ ID NO: 4653
  Probe

SEQ ID NO: 46616 - DNA, 40 bp, Artificial Sequence; identical to SEQ ID NO: 4654
  Probe

SEQ ID NO: 46617 - DNA, 41 bp, Artificial Sequence; identical to SEQ ID NO: 4655
  Probe

SEQ ID NO: 46618 - DNA, 42 bp, Artificial Sequence; identical to SEQ ID NO: 4656
  Probe

SEQ ID NO: 46619 - DNA, 43 bp, Artificial Sequence; identical to SEQ ID NO: 4657
  Probe

SEQ ID NO: 46620 - DNA, 44 bp, Artificial Sequence; identical to SEQ ID NO: 4658
  Probe

SEQ ID NO: 46621 - DNA, 45 bp, Artificial Sequence; identical to SEQ ID NO: 4659
  Probe

SEQ ID NO: 46622 - DNA, 49 bp, Artificial Sequence; identical to SEQ ID NO: 4660
  Probe

SEQ ID NO: 46623 - DNA, 50 bp, Artificial Sequence; identical to SEQ ID NO: 4661
  Probe

SEQ ID NO: 46624 - DNA, 40 bp, Artificial Sequence; identical to SEQ ID NO: 4662
  Probe

SEQ ID NO: 46625 - DNA, 41 bp, Artificial Sequence
  Probe
cccattcttgcgacccgggttcgattcccgggcggcgcata

SEQ ID NO: 46626 - DNA, 42 bp, Artificial Sequence
  Probe
cccattcttgcgacccgggttcgattcccgggcggcgcatag

SEQ ID NO: 46627 - DNA, 43 bp, Artificial Sequence; identical to SEQ ID NO: 4663
  Probe

SEQ ID NO: 46628 - DNA, 44 bp, Artificial Sequence; identical to SEQ ID NO: 4664
  Probe

SEQ ID NO: 46629 - DNA, 45 bp, Artificial Sequence; identical to SEQ ID NO: 4665
  Probe

SEQ ID NO: 46630 - DNA, 50 bp, Artificial Sequence; identical to SEQ ID NO: 4666
  Probe

SEQ ID NO: 46631 - DNA, 19 bp, Artificial Sequence
  Probe
ccccaaaaattttggtgca

SEQ ID NO: 46632 - DNA, 24 bp, Artificial Sequence
  Probe
ccccaaaaattttggtgcaactcc

SEQ ID NO: 46633 - DNA, 25 bp, Artificial Sequence
  Probe
ccccaaaaattttggtgcaactcca

SEQ ID NO: 46634 - DNA, 26 bp, Artificial Sequence
  Probe
ccccaaaaattttggtgcaactccaa

SEQ ID NO: 46635 - DNA, 27 bp, Artificial Sequence
  Probe
ccccaaaaattttggtgcaactccaaa

SEQ ID NO: 46636 - DNA, 28 bp, Artificial Sequence
  Probe
ccccaaaaattttggtgcaactccaaat

SEQ ID NO: 46637 - DNA, 29 bp, Artificial Sequence
  Probe
ccccaaaaattttggtgcaactccaaata

SEQ ID NO: 46638 - DNA, 31 bp, Artificial Sequence; identical to SEQ ID NO: 18438
  Probe

SEQ ID NO: 46639 - DNA, 33 bp, Artificial Sequence; identical to SEQ ID NO: 18439
  Probe

SEQ ID NO: 46640 - DNA, 34 bp, Artificial Sequence; identical to SEQ ID NO: 18440
  Probe

SEQ ID NO: 46641 - DNA, 35 bp, Artificial Sequence; identical to SEQ ID NO: 18441
  Probe

SEQ ID NO: 46642 - DNA, 36 bp, Artificial Sequence; identical to SEQ ID NO: 18442
  Probe

SEQ ID NO: 46643 - DNA, 37 bp, Artificial Sequence; identical to SEQ ID NO: 4672
  Probe

SEQ ID NO: 46644 - DNA, 38 bp, Artificial Sequence; identical to SEQ ID NO: 4673
  Probe

SEQ ID NO: 46645 - DNA, 40 bp, Artificial Sequence; identical to SEQ ID NO: 18445
  Probe

SEQ ID NO: 46646 - DNA, 44 bp, Artificial Sequence
  Probe
ccccaaaaattttggtgcaactccaaataaaagtaataaccatg

SEQ ID NO: 46647 - DNA, 19 bp, Artificial Sequence
  Probe
ccccaaacccactccacct

SEQ ID NO: 46648 - DNA, 25 bp, Artificial Sequence
  Probe
ccccaactaaatactaccgtatggc

SEQ ID NO: 46649 - DNA, 22 bp, Artificial Sequence
  Probe
ccccatgtctaacaacatggct

SEQ ID NO: 46650 - DNA, 23 bp, Artificial Sequence
  Probe
ccccatgtctaacaacatggctt

SEQ ID NO: 46651 - DNA, 24 bp, Artificial Sequence
  Probe
ccccatgtctaacaacatggcttt

SEQ ID NO: 46652 - DNA, 25 bp, Artificial Sequence
  Probe
ccccatgtctaacaacatggctttc

SEQ ID NO: 46653 - DNA, 28 bp, Artificial Sequence
  Probe
ccccatgtctaacaacatggctttctca

SEQ ID NO: 46654 - DNA, 30 bp, Artificial Sequence; identical to SEQ ID NO: 4683
  Probe

SEQ ID NO: 46655 - DNA, 31 bp, Artificial Sequence; identical to SEQ ID NO: 4684
  Probe

SEQ ID NO: 46656 - DNA, 23 bp, Artificial Sequence
  Probe
cccccatgtctaacaacatggct

SEQ ID NO: 46657 - DNA, 24 bp, Artificial Sequence
  Probe
cccccatgtctaacaacatggctt

SEQ ID NO: 46658 - DNA, 25 bp, Artificial Sequence
  Probe
cccccatgtctaacaacatggcttt

SEQ ID NO: 46659 - DNA, 26 bp, Artificial Sequence
  Probe
cccccatgtctaacaacatggctttc

SEQ ID NO: 46660 - DNA, 27 bp, Artificial Sequence
  Probe
cccccatgtctaacaacatggctttct

SEQ ID NO: 46661 - DNA, 29 bp, Artificial Sequence
  Probe
cccccatgtctaacaacatggctttctca

SEQ ID NO: 46662 - DNA, 31 bp, Artificial Sequence; identical to SEQ ID NO: 4695
  Probe

SEQ ID NO: 46663 - DNA, 32 bp, Artificial Sequence; identical to SEQ ID NO: 4696
  Probe

SEQ ID NO: 46664 - DNA, 31 bp, Artificial Sequence
  Probe
ccccctctgtgctccggagttacctcgtttt

SEQ ID NO: 46665 - DNA, 22 bp, Artificial Sequence
  Probe
ccccgaaaatgttggttatacc

SEQ ID NO: 46666 - DNA, 23 bp, Artificial Sequence
  Probe
ccccgaaaatgttggttataccc

SEQ ID NO: 46667 - DNA, 27 bp, Artificial Sequence
  Probe
ccccgaaaatgttggttatacccttcc

SEQ ID NO: 46668 - DNA, 28 bp, Artificial Sequence
  Probe
ccccgaaaatgttggttatacccttccc

SEQ ID NO: 46669 - DNA, 29 bp, Artificial Sequence
  Probe
ccccgaaaatgttggttatacccttcccg

SEQ ID NO: 46670 - DNA, 30 bp, Artificial Sequence; identical to SEQ ID NO: 4700
  Probe

SEQ ID NO: 46671 - DNA, 35 bp, Artificial Sequence; identical to SEQ ID NO: 4702
  Probe

SEQ ID NO: 46672 - DNA, 36 bp, Artificial Sequence; identical to SEQ ID NO: 18491
  Probe

SEQ ID NO: 46673 - DNA, 37 bp, Artificial Sequence; identical to SEQ ID NO: 4703
  Probe

SEQ ID NO: 46674 - DNA, 29 bp, Artificial Sequence
  Probe
ccccgcacaggttcgaatcctgttcgtga

SEQ ID NO: 46675 - DNA, 31 bp, Artificial Sequence
  Probe
ccccgcacaggttcgaatcctgttcgtgacg

SEQ ID NO: 46676 - DNA, 50 bp, Artificial Sequence; identical to SEQ ID NO: 4704
  Probe

SEQ ID NO: 46677 - DNA, 29 bp, Artificial Sequence
  Probe
ccccgcgcaggttcgaatcctgccgacta

SEQ ID NO: 46678 - DNA, 29 bp, Artificial Sequence
  Probe
ccccgcgcaggttcgaatcctgctcacag

SEQ ID NO: 46679 - DNA, 16 bp, Artificial Sequence
  Probe
ccccggcacctccacc

SEQ ID NO: 46680 - DNA, 18 bp, Artificial Sequence
  Probe
ccccggcacctccaccag

SEQ ID NO: 46681 - DNA, 19 bp, Artificial Sequence
  Probe
ccccggcacctccaccagt

SEQ ID NO: 46682 - DNA, 20 bp, Artificial Sequence
  Probe
ccccgggttcaatccccggc

SEQ ID NO: 46683 - DNA, 21 bp, Artificial Sequence
  Probe
ccccgggttcaatccccggca

SEQ ID NO: 46684 - DNA, 23 bp, Artificial Sequence
  Probe
ccccgggttcaatccccggcacc

SEQ ID NO: 46685 - DNA, 25 bp, Artificial Sequence
  Probe
ccccgggttcaatccccggcacctc

SEQ ID NO: 46686 - DNA, 28 bp, Artificial Sequence
  Probe
ccccgggttcaatccccggcacctccag

SEQ ID NO: 46687 - DNA, 29 bp, Artificial Sequence
  Probe
ccccgggttcaatccccggcacctccagc

SEQ ID NO: 46688 - DNA, 28 bp, Artificial Sequence
  Probe
ccccgggttcaatccccggcacctccat

SEQ ID NO: 46689 - DNA, 29 bp, Artificial Sequence
  Probe
ccccgggttcaatccccggcacctccatt

SEQ ID NO: 46690 - DNA, 25 bp, Artificial Sequence
  Probe
ccccgggttcaatccccggcatctc

SEQ ID NO: 46691 - DNA, 28 bp, Artificial Sequence
  Probe
ccccgggttcaatccccggcatctccag

SEQ ID NO: 46692 - DNA, 29 bp, Artificial Sequence
  Probe
ccccgggttcaatccccggcatctccaga

SEQ ID NO: 46693 - DNA, 30 bp, Artificial Sequence; identical to SEQ ID NO: 39077
  Probe

SEQ ID NO: 46694 - DNA, 24 bp, Artificial Sequence
  Probe
ccccgggttcgacccccggctcct

SEQ ID NO: 46695 - DNA, 25 bp, Artificial Sequence
  Probe
ccccgggttcgacccccggctcctc

SEQ ID NO: 46696 - DNA, 28 bp, Artificial Sequence
  Probe
ccccgggttcgacccccggctcctccag

SEQ ID NO: 46697 - DNA, 29 bp, Artificial Sequence
  Probe
ccccgggttcgacccccggctcctccagt

SEQ ID NO: 46698 - DNA, 30 bp, Artificial Sequence
  Probe
ccccgggttcgacccccggctcctccagtt

SEQ ID NO: 46699 - DNA, 20 bp, Artificial Sequence
  Probe
ccccgggttcgatccccggc

SEQ ID NO: 46700 - DNA, 25 bp, Artificial Sequence
  Probe
ccccgggttcgatccccggcatctc

SEQ ID NO: 46701 - DNA, 28 bp, Artificial Sequence
  Probe
ccccgggttcgatccccggcatctccaa

SEQ ID NO: 46702 - DNA, 28 bp, Artificial Sequence
  Probe
ccccgggttcgatccccggcatctccag

SEQ ID NO: 46703 - DNA, 28 bp, Artificial Sequence
  Probe
ccccgggttcgatccccggcatctccat

SEQ ID NO: 46704 - DNA, 29 bp, Artificial Sequence
  Probe
ccccgggttcgatccccggcatctccatt

SEQ ID NO: 46705 - DNA, 30 bp, Artificial Sequence; identical to SEQ ID NO: 4721
  Probe

SEQ ID NO: 46706 - DNA, 26 bp, Artificial Sequence
  Probe
ccccggttcaaatccgggtgccccct

SEQ ID NO: 46707 - DNA, 29 bp, Artificial Sequence
  Probe
ccccggttcaaatccgggtgccccctcac

SEQ ID NO: 46708 - DNA, 29 bp, Artificial Sequence
  Probe
ccccggttcaaatccgggtgccccctctg

SEQ ID NO: 46709 - DNA, 26 bp, Artificial Sequence
  Probe
ccccggttcgaaaccgggcggaaaca

SEQ ID NO: 46710 - DNA, 29 bp, Artificial Sequence
  Probe
ccccggttcgaaaccgggcggaaacacct

SEQ ID NO: 46711 - DNA, 26 bp, Artificial Sequence
  Probe
ccccggttcgatcccgggcggaaaca

SEQ ID NO: 46712 - DNA, 29 bp, Artificial Sequence
  Probe
ccccggttcgatcccgggcggaaacaggt

SEQ ID NO: 46713 - DNA, 27 bp, Artificial Sequence
  Probe
cccctcatttacataaatattatacta

SEQ ID NO: 46714 - DNA, 28 bp, Artificial Sequence
  Probe
cccctctgtgctccggagttacctcgtt

SEQ ID NO: 46715 - DNA, 29 bp, Artificial Sequence
  Probe
cccctggcggtctagtggttaggattcgg

SEQ ID NO: 46716 - DNA, 31 bp, Artificial Sequence; identical to SEQ ID NO: 18512
  Probe

SEQ ID NO: 46717 - DNA, 32 bp, Artificial Sequence; identical to SEQ ID NO: 4722
  Probe

SEQ ID NO: 46718 - DNA, 33 bp, Artificial Sequence; identical to SEQ ID NO: 4723
  Probe

SEQ ID NO: 46719 - DNA, 34 bp, Artificial Sequence; identical to SEQ ID NO: 4724
  Probe

SEQ ID NO: 46720 - DNA, 35 bp, Artificial Sequence; identical to SEQ ID NO: 4725
  Probe

SEQ ID NO: 46721 - DNA, 36 bp, Artificial Sequence; identical to SEQ ID NO: 4726
  Probe

SEQ ID NO: 46722 - DNA, 27 bp, Artificial Sequence
  Probe
cccgaaaatgttggttatacccttccc

SEQ ID NO: 46723 - DNA, 28 bp, Artificial Sequence
  Probe
cccgaaaatgttggttatacccttcccg

SEQ ID NO: 46724 - DNA, 29 bp, Artificial Sequence
  Probe
cccgaaaatgttggttatacccttcccgt

SEQ ID NO: 46725 - DNA, 33 bp, Artificial Sequence; identical to SEQ ID NO: 614
  Probe

SEQ ID NO: 46726 - DNA, 34 bp, Artificial Sequence; identical to SEQ ID NO: 4734
  Probe

SEQ ID NO: 46727 - DNA, 35 bp, Artificial Sequence; identical to SEQ ID NO: 4735
  Probe

SEQ ID NO: 46728 - DNA, 36 bp, Artificial Sequence; identical to SEQ ID NO: 18528
  Probe

SEQ ID NO: 46729 - DNA, 28 bp, Artificial Sequence
  Probe
cccgcacaggttcgaatcctgttcgtga

SEQ ID NO: 46730 - DNA, 50 bp, Artificial Sequence; identical to SEQ ID NO: 4737
  Probe

SEQ ID NO: 46731 - DNA, 50 bp, Artificial Sequence
  Probe
cccgcctgtcacgcgggagaccggggttcgattccccgacggggaggccg

SEQ ID NO: 46732 - DNA, 16 bp, Artificial Sequence
  Probe
cccgccttttttcccg

SEQ ID NO: 46733 - DNA, 27 bp, Artificial Sequence
  Probe
cccgccttttttcccggcggcgggaga

SEQ ID NO: 46734 - DNA, 28 bp, Artificial Sequence
  Probe
cccgccttttttcccggcggcgggagaa

SEQ ID NO: 46735 - DNA, 29 bp, Artificial Sequence
  Probe
cccgccttttttcccggcggcgggagaag

SEQ ID NO: 46736 - DNA, 30 bp, Artificial Sequence; identical to SEQ ID NO: 4742
  Probe

SEQ ID NO: 46737 - DNA, 28 bp, Artificial Sequence
  Probe
cccgcgcaggttcgaatcctgccgacta

SEQ ID NO: 46738 - DNA, 28 bp, Artificial Sequence
  Probe
cccgcgcaggttcgaatcctgctcacag

SEQ ID NO: 46739 - DNA, 33 bp, Artificial Sequence; identical to SEQ ID NO: 618
  Probe

SEQ ID NO: 46740 - DNA, 34 bp, Artificial Sequence; identical to SEQ ID NO: 619
  Probe

SEQ ID NO: 46741 - DNA, 16 bp, Artificial Sequence
  Probe
cccggcacctccacca

SEQ ID NO: 46742 - DNA, 27 bp, Artificial Sequence
  Probe
cccggccaacgcatgcggtaccacttt

SEQ ID NO: 46743 - DNA, 32 bp, Artificial Sequence; identical to SEQ ID NO: 12971
  Probe

SEQ ID NO: 46744 - DNA, 35 bp, Artificial Sequence; identical to SEQ ID NO: 625
  Probe

SEQ ID NO: 46745 - DNA, 33 bp, Artificial Sequence; identical to SEQ ID NO: 628
  Probe

SEQ ID NO: 46746 - DNA, 35 bp, Artificial Sequence; identical to SEQ ID NO: 630
  Probe

SEQ ID NO: 46747 - DNA, 28 bp, Artificial Sequence
  Probe
cccgggttcaaatcccggacgagccccc

SEQ ID NO: 46748 - DNA, 29 bp, Artificial Sequence
  Probe
cccgggttcaaatcccggacgagccccct

SEQ ID NO: 46749 - DNA, 26 bp, Artificial Sequence
  Probe
cccgggttcaatccccggcacctcca

SEQ ID NO: 46750 - DNA, 28 bp, Artificial Sequence
  Probe
cccgggttcaatccccggcacctccacc

SEQ ID NO: 46751 - DNA, 26 bp, Artificial Sequence
  Probe
cccgggttcaatccccggcatctcca

SEQ ID NO: 46752 - DNA, 28 bp, Artificial Sequence
  Probe
cccgggttcaattcccggtcagggaacc

SEQ ID NO: 46753 - DNA, 29 bp, Artificial Sequence
  Probe
cccgggttcaattcccggtcagggaacca

SEQ ID NO: 46754 - DNA, 21 bp, Artificial Sequence
  Probe
cccgggttcgatccccagcat

SEQ ID NO: 46755 - DNA, 27 bp, Artificial Sequence
  Probe
cccgggttcgatccccagcatctccag

SEQ ID NO: 46756 - DNA, 28 bp, Artificial Sequence
  Probe
cccgggttcgatccccagcatctccagt

SEQ ID NO: 46757 - DNA, 29 bp, Artificial Sequence
  Probe
cccgggttcgatccccagcatctccagtg

SEQ ID NO: 46758 - DNA, 26 bp, Artificial Sequence
  Probe
cccgggttcgatccccggcatctcca

SEQ ID NO: 46759 - DNA, 28 bp, Artificial Sequence
  Probe
cccgggttcgatccccggcatctccatt

SEQ ID NO: 46760 - DNA, 29 bp, Artificial Sequence
  Probe
cccgggttcgatccccggcatctccattg

SEQ ID NO: 46761 - DNA, 28 bp, Artificial Sequence
  Probe
cccgggttcgattcccggtcagggaagc

SEQ ID NO: 46762 - DNA, 28 bp, Artificial Sequence
  Probe
cccgggttcgattcccggtcatggaacc

SEQ ID NO: 46763 - DNA, 29 bp, Artificial Sequence
  Probe
cccgggttcgattcccggtcatggaacca

SEQ ID NO: 46764 - DNA, 27 bp, Artificial Sequence
  Probe
cccggtaatcgcataaaacttaaaact

SEQ ID NO: 46765 - DNA, 32 bp, Artificial Sequence; identical to SEQ ID NO: 18572
  Probe

SEQ ID NO: 46766 - DNA, 35 bp, Artificial Sequence
  Probe
cccggtaatcgcataaaacttaaaactttacagtc

SEQ ID NO: 46767 - DNA, 38 bp, Artificial Sequence
  Probe
cccggtaatcgcataaaacttaaaactttacagtcaga

SEQ ID NO: 46768 - DNA, 40 bp, Artificial Sequence
  Probe
cccggtaatcgcataaaacttaaaactttacagtcagagg

SEQ ID NO: 46769 - DNA, 43 bp, Artificial Sequence; identical to SEQ ID NO: 4759
  Probe

SEQ ID NO: 46770 - DNA, 44 bp, Artificial Sequence
  Probe
cccggtaatcgcataaaacttaaaactttacagtcagaggttca

SEQ ID NO: 46771 - DNA, 50 bp, Artificial Sequence; identical to SEQ ID NO: 632
  Probe

SEQ ID NO: 46772 - DNA, 16 bp, Artificial Sequence
  Probe
cccggtcagggaacca

SEQ ID NO: 46773 - DNA, 33 bp, Artificial Sequence; identical to SEQ ID NO: 4763
  Probe

SEQ ID NO: 46774 - DNA, 26 bp, Artificial Sequence
  Probe
ccctcatttacataaatattatacta

SEQ ID NO: 46775 - DNA, 32 bp, Artificial Sequence; identical to SEQ ID NO: 18577
  Probe

SEQ ID NO: 46776 - DNA, 27 bp, Artificial Sequence
  Probe
ccctgggttcaatccccagcacctcca

SEQ ID NO: 46777 - DNA, 31 bp, Artificial Sequence; identical to SEQ ID NO: 633
  Probe

SEQ ID NO: 46778 - DNA, 32 bp, Artificial Sequence; identical to SEQ ID NO: 634
  Probe

SEQ ID NO: 46779 - DNA, 34 bp, Artificial Sequence; identical to SEQ ID NO: 635
  Probe

SEQ ID NO: 46780 - DNA, 18 bp, Artificial Sequence
  Probe
ccctggtggtctagtggt

SEQ ID NO: 46781 - DNA, 19 bp, Artificial Sequence
  Probe
ccctggtggtctagtggtt

SEQ ID NO: 46782 - DNA, 25 bp, Artificial Sequence
  Probe
ccctggtggtctagtggttaggatt

SEQ ID NO: 46783 - DNA, 27 bp, Artificial Sequence
  Probe
ccctggtggtctagtggttaggattcg

SEQ ID NO: 46784 - DNA, 28 bp, Artificial Sequence
  Probe
ccctggtggtctagtggttaggattcgg

SEQ ID NO: 46785 - DNA, 29 bp, Artificial Sequence
  Probe
ccctggtggtctagtggttaggattcggc

SEQ ID NO: 46786 - DNA, 36 bp, Artificial Sequence; identical to SEQ ID NO: 643
  Probe

SEQ ID NO: 46787 - DNA, 28 bp, Artificial Sequence
  Probe
ccctggttcaaatccgggtgccccctca

SEQ ID NO: 46788 - DNA, 29 bp, Artificial Sequence
  Probe
ccctggttcaaatccgggtgccccctcaa

SEQ ID NO: 46789 - DNA, 26 bp, Artificial Sequence
  Probe
ccctggttcaatcccgggtttcggca

SEQ ID NO: 46790 - DNA, 28 bp, Artificial Sequence
  Probe
ccctggttcaatcccgggtttcggcagc

SEQ ID NO: 46791 - DNA, 16 bp, Artificial Sequence
  Probe
ccctggttcgatcccg

SEQ ID NO: 46792 - DNA, 28 bp, Artificial Sequence
  Probe
ccctggttcgatcccgggtttcggcact

SEQ ID NO: 46793 - DNA, 29 bp, Artificial Sequence
  Probe
ccctggttcgatcccgggtttcggcactt

SEQ ID NO: 46794 - DNA, 20 bp, Artificial Sequence
  Probe
ccgaaaatgttggttatacc

SEQ ID NO: 46795 - DNA, 21 bp, Artificial Sequence
  Probe
ccgaaaatgttggttataccc

SEQ ID NO: 46796 - DNA, 25 bp, Artificial Sequence
  Probe
ccgaaaatgttggttatacccttcc

SEQ ID NO: 46797 - DNA, 26 bp, Artificial Sequence
  Probe
ccgaaaatgttggttatacccttccc

SEQ ID NO: 46798 - DNA, 27 bp, Artificial Sequence
  Probe
ccgaaaatgttggttatacccttcccg

SEQ ID NO: 46799 - DNA, 28 bp, Artificial Sequence
  Probe
ccgaaaatgttggttatacccttcccgt

SEQ ID NO: 46800 - DNA, 33 bp, Artificial Sequence; identical to SEQ ID NO: 4783
  Probe

SEQ ID NO: 46801 - DNA, 34 bp, Artificial Sequence; identical to SEQ ID NO: 18602
  Probe

SEQ ID NO: 46802 - DNA, 35 bp, Artificial Sequence; identical to SEQ ID NO: 18603
  Probe

SEQ ID NO: 46803 - DNA, 37 bp, Artificial Sequence; identical to SEQ ID NO: 4785
  Probe

SEQ ID NO: 46804 - DNA, 38 bp, Artificial Sequence; identical to SEQ ID NO: 18607
  Probe

SEQ ID NO: 46805 - DNA, 36 bp, Artificial Sequence
  Probe
ccgaaaggttggtggttcgatcccacccagggacgg

SEQ ID NO: 46806 - DNA, 29 bp, Artificial Sequence
  Probe
ccgaggttgtgagttcgagcctcacctgg

SEQ ID NO: 46807 - DNA, 30 bp, Artificial Sequence
  Probe
ccgaggttgtgagttcgagcctcacctgga

SEQ ID NO: 46808 - DNA, 32 bp, Artificial Sequence
  Probe
ccgaggttgtgagttcgagcctcacctggagc

SEQ ID NO: 46809 - DNA, 36 bp, Artificial Sequence; identical to SEQ ID NO: 4787
  Probe

SEQ ID NO: 46810 - DNA, 33 bp, Artificial Sequence
  Probe
ccgaggttgtgagttcgatcctcacctggagca

SEQ ID NO: 46811 - DNA, 27 bp, Artificial Sequence
  Probe
ccgcacaggttcgaatcctgttcgtga

SEQ ID NO: 46812 - DNA, 16 bp, Artificial Sequence
  Probe
ccgcagcaacctcggt

SEQ ID NO: 46813 - DNA, 32 bp, Artificial Sequence; identical to SEQ ID NO: 4790
  Probe

SEQ ID NO: 46814 - DNA, 33 bp, Artificial Sequence; identical to SEQ ID NO: 4791
  Probe

SEQ ID NO: 46815 - DNA, 35 bp, Artificial Sequence; identical to SEQ ID NO: 18619
  Probe

SEQ ID NO: 46816 - DNA, 36 bp, Artificial Sequence; identical to SEQ ID NO: 18620
  Probe

SEQ ID NO: 46817 - DNA, 37 bp, Artificial Sequence; identical to SEQ ID NO: 4792
  Probe

SEQ ID NO: 46818 - DNA, 36 bp, Artificial Sequence; identical to SEQ ID NO: 18622
  Probe

SEQ ID NO: 46819 - DNA, 37 bp, Artificial Sequence; identical to SEQ ID NO: 4793
  Probe

SEQ ID NO: 46820 - DNA, 38 bp, Artificial Sequence; identical to SEQ ID NO: 4794
  Probe

SEQ ID NO: 46821 - DNA, 36 bp, Artificial Sequence; identical to SEQ ID NO: 18625
  Probe

SEQ ID NO: 46822 - DNA, 37 bp, Artificial Sequence; identical to SEQ ID NO: 4795
  Probe

SEQ ID NO: 46823 - DNA, 38 bp, Artificial Sequence; identical to SEQ ID NO: 4796
  Probe

SEQ ID NO: 46824 - DNA, 35 bp, Artificial Sequence; identical to SEQ ID NO: 13008
  Probe

SEQ ID NO: 46825 - DNA, 36 bp, Artificial Sequence; identical to SEQ ID NO: 4797
  Probe

SEQ ID NO: 46826 - DNA, 36 bp, Artificial Sequence; identical to SEQ ID NO: 4798
  Probe

SEQ ID NO: 46827 - DNA, 38 bp, Artificial Sequence; identical to SEQ ID NO: 18639
  Probe

SEQ ID NO: 46828 - DNA, 36 bp, Artificial Sequence; identical to SEQ ID NO: 4800
  Probe

SEQ ID NO: 46829 - DNA, 38 bp, Artificial Sequence; identical to SEQ ID NO: 4802
  Probe

SEQ ID NO: 46830 - DNA, 17 bp, Artificial Sequence
  Probe
ccgcctgtcacgcggga

SEQ ID NO: 46831 - DNA, 26 bp, Artificial Sequence
  Probe
ccgcctgtcacgcgggagaccggggt

SEQ ID NO: 46832 - DNA, 50 bp, Artificial Sequence
  Probe
ccgcctgtcacgcgggagaccggggttcaattccccgacggggaggtgtg

SEQ ID NO: 46833 - DNA, 42 bp, Artificial Sequence; identical to SEQ ID NO: 18656
  Probe

SEQ ID NO: 46834 - DNA, 44 bp, Artificial Sequence
  Probe
ccgcctgtcacgcgggagaccggggttcgattccccgacgggga

SEQ ID NO: 46835 - DNA, 49 bp, Artificial Sequence; identical to SEQ ID NO: 4803
  Probe

SEQ ID NO: 46836 - DNA, 50 bp, Artificial Sequence; identical to SEQ ID NO: 4804
  Probe

SEQ ID NO: 46837 - DNA, 50 bp, Artificial Sequence
  Probe
ccgcctgtcacgcgggagaccggggttcgattccccgacggggaggcagc

SEQ ID NO: 46838 - DNA, 50 bp, Artificial Sequence
  Probe
ccgcctgtcacgcgggagaccggggttcgattccccgacggggaggccgg

SEQ ID NO: 46839 - DNA, 27 bp, Artificial Sequence
  Probe
ccgccttttttcccggcggcgggagaa

SEQ ID NO: 46840 - DNA, 27 bp, Artificial Sequence
  Probe
ccgcgcaggttcgaatcctgccgacta

SEQ ID NO: 46841 - DNA, 27 bp, Artificial Sequence
  Probe
ccgcgcaggttcgaatcctgctcacag

SEQ ID NO: 46842 - DNA, 31 bp, Artificial Sequence; identical to SEQ ID NO: 4807
  Probe

SEQ ID NO: 46843 - DNA, 32 bp, Artificial Sequence; identical to SEQ ID NO: 4808
  Probe

SEQ ID NO: 46844 - DNA, 33 bp, Artificial Sequence; identical to SEQ ID NO: 4809
  Probe

SEQ ID NO: 46845 - DNA, 33 bp, Artificial Sequence; identical to SEQ ID NO: 4810
  Probe

SEQ ID NO: 46846 - DNA, 33 bp, Artificial Sequence; identical to SEQ ID NO: 4811
  Probe

SEQ ID NO: 46847 - DNA, 35 bp, Artificial Sequence; identical to SEQ ID NO: 4812
  Probe

SEQ ID NO: 46848 - DNA, 26 bp, Artificial Sequence
  Probe
ccgctggtgtagtggtatcatgcaag

SEQ ID NO: 46849 - DNA, 27 bp, Artificial Sequence
  Probe
ccgctggtgtagtggtatcatgcaaga

SEQ ID NO: 46850 - DNA, 30 bp, Artificial Sequence; identical to SEQ ID NO: 657
  Probe

SEQ ID NO: 46851 - DNA, 50 bp, Artificial Sequence; identical to SEQ ID NO: 18682
  Probe

SEQ ID NO: 46852 - DNA, 16 bp, Artificial Sequence
  Probe
ccggagatgaaaacct

SEQ ID NO: 46853 - DNA, 18 bp, Artificial Sequence
  Probe
ccggagatgaaaaccttt

SEQ ID NO: 46854 - DNA, 19 bp, Artificial Sequence
  Probe
ccggagatgaaaacctttt

SEQ ID NO: 46855 - DNA, 23 bp, Artificial Sequence
  Probe
ccggagatgaaaacctttttcca

SEQ ID NO: 46856 - DNA, 28 bp, Artificial Sequence
  Probe
ccggagatgaaaacctttttccaaggac

SEQ ID NO: 46857 - DNA, 30 bp, Artificial Sequence; identical to SEQ ID NO: 4816
  Probe

SEQ ID NO: 46858 - DNA, 31 bp, Artificial Sequence; identical to SEQ ID NO: 4817
  Probe

SEQ ID NO: 46859 - DNA, 32 bp, Artificial Sequence; identical to SEQ ID NO: 4818
  Probe

SEQ ID NO: 46860 - DNA, 33 bp, Artificial Sequence; identical to SEQ ID NO: 4819
  Probe

SEQ ID NO: 46861 - DNA, 30 bp, Artificial Sequence; identical to SEQ ID NO: 668
  Probe

SEQ ID NO: 46862 - DNA, 31 bp, Artificial Sequence; identical to SEQ ID NO: 669
  Probe

SEQ ID NO: 46863 - DNA, 33 bp, Artificial Sequence; identical to SEQ ID NO: 671
  Probe

SEQ ID NO: 46864 - DNA, 34 bp, Artificial Sequence; identical to SEQ ID NO: 672
  Probe

SEQ ID NO: 46865 - DNA, 28 bp, Artificial Sequence
  Probe
ccggccaacgcagtgtcagtttttctct

SEQ ID NO: 46866 - DNA, 26 bp, Artificial Sequence
  Probe
ccggccaacgcatgcggtaccacttt

SEQ ID NO: 46867 - DNA, 17 bp, Artificial Sequence
  Probe
ccggcggcgggagaagt

SEQ ID NO: 46868 - DNA, 31 bp, Artificial Sequence; identical to SEQ ID NO: 676
  Probe

SEQ ID NO: 46869 - DNA, 32 bp, Artificial Sequence; identical to SEQ ID NO: 677
  Probe

SEQ ID NO: 46870 - DNA, 27 bp, Artificial Sequence
  Probe
ccggctagctcagtcggtagagcatgg

SEQ ID NO: 46871 - DNA, 28 bp, Artificial Sequence
  Probe
ccggctagctcagtcggtagagcatggg

SEQ ID NO: 46872 - DNA, 31 bp, Artificial Sequence; identical to SEQ ID NO: 681
  Probe

SEQ ID NO: 46873 - DNA, 32 bp, Artificial Sequence; identical to SEQ ID NO: 682
  Probe

SEQ ID NO: 46874 - DNA, 50 bp, Artificial Sequence; identical to SEQ ID NO: 4828
  Probe

SEQ ID NO: 46875 - DNA, 25 bp, Artificial Sequence
  Probe
ccggggttcgattccccgacgggga

SEQ ID NO: 46876 - DNA, 26 bp, Artificial Sequence
  Probe
ccggggttcgattccccgacggggag

SEQ ID NO: 46877 - DNA, 29 bp, Artificial Sequence
  Probe
ccggggttcgattccccgacggggaggca

SEQ ID NO: 46878 - DNA, 28 bp, Artificial Sequence
  Probe
ccgggttcaatccccggcacctccacca

SEQ ID NO: 46879 - DNA, 25 bp, Artificial Sequence
  Probe
ccgggttcgatccccagcatctcca

SEQ ID NO: 46880 - DNA, 28 bp, Artificial Sequence
  Probe
ccgggttcgatccccagcatctccagtg

SEQ ID NO: 46881 - DNA, 26 bp, Artificial Sequence
  Probe
ccggtaatcgcataaaacttaaaact

SEQ ID NO: 46882 - DNA, 31 bp, Artificial Sequence; identical to SEQ ID NO: 30140
  Probe

SEQ ID NO: 46883 - DNA, 34 bp, Artificial Sequence
  Probe
ccggtaatcgcataaaacttaaaactttacagtc

SEQ ID NO: 46884 - DNA, 37 bp, Artificial Sequence
  Probe
ccggtaatcgcataaaacttaaaactttacagtcaga

SEQ ID NO: 46885 - DNA, 38 bp, Artificial Sequence
  Probe
ccggtaatcgcataaaacttaaaactttacagtcagag

SEQ ID NO: 46886 - DNA, 39 bp, Artificial Sequence
  Probe
ccggtaatcgcataaaacttaaaactttacagtcagagg

SEQ ID NO: 46887 - DNA, 42 bp, Artificial Sequence
  Probe
ccggtaatcgcataaaacttaaaactttacagtcagaggttc

SEQ ID NO: 46888 - DNA, 50 bp, Artificial Sequence; identical to SEQ ID NO: 685
  Probe

SEQ ID NO: 46889 - DNA, 27 bp, Artificial Sequence
  Probe
ccggttcgaaaccgggcggaaacacct

SEQ ID NO: 46890 - DNA, 24 bp, Artificial Sequence
  Probe
ccgtagtgtagtggtcatcacgtt

SEQ ID NO: 46891 - DNA, 27 bp, Artificial Sequence
  Probe
ccgtagtgtagtggtcatcacgttcgc

SEQ ID NO: 46892 - DNA, 28 bp, Artificial Sequence
  Probe
ccgtagtgtagtggtcatcacgttcgcc

SEQ ID NO: 46893 - DNA, 24 bp, Artificial Sequence
  Probe
ccgtagtgtagtggttatcacgtt

SEQ ID NO: 46894 - DNA, 27 bp, Artificial Sequence
  Probe
ccgtagtgtagtggttatcacgttcgc

SEQ ID NO: 46895 - DNA, 28 bp, Artificial Sequence
  Probe
ccgtagtgtagtggttatcacgttcgcc

SEQ ID NO: 46896 - DNA, 29 bp, Artificial Sequence
  Probe
ccgtagtgtagtggttatcacgttcgcct

SEQ ID NO: 46897 - DNA, 50 bp, Artificial Sequence; identical to SEQ ID NO: 4842
  Probe

SEQ ID NO: 46898 - DNA, 49 bp, Artificial Sequence
  Probe
ccgtagtgtagtggttatcacgttcgcctcacacgcgaaaggtccccgg

SEQ ID NO: 46899 - DNA, 50 bp, Artificial Sequence; identical to SEQ ID NO: 4847
  Probe

SEQ ID NO: 46900 - DNA, 34 bp, Artificial Sequence; identical to SEQ ID NO: 689
  Probe

SEQ ID NO: 46901 - DNA, 20 bp, Artificial Sequence
  Probe
ccgtgtttcccccacgcttt

SEQ ID NO: 46902 - DNA, 21 bp, Artificial Sequence
  Probe
ccgtgtttcccccacgctttt

SEQ ID NO: 46903 - DNA, 24 bp, Artificial Sequence
  Probe
ccgttaacttccaattaactagtt

SEQ ID NO: 46904 - DNA, 28 bp, Artificial Sequence
  Probe
ccgttaacttccaattaactagttttga

SEQ ID NO: 46905 - DNA, 49 bp, Artificial Sequence
  Probe
ccgttaacttccaattaactagttttgacaacattcaaaaaagagtaat

SEQ ID NO: 46906 - DNA, 50 bp, Artificial Sequence; identical to SEQ ID NO: 4855
  Probe

SEQ ID NO: 46907 - DNA, 43 bp, Artificial Sequence
  Probe
cctaagccagggattgtgggttcgagtcccacccggggtaaag

SEQ ID NO: 46908 - DNA, 43 bp, Artificial Sequence
  Probe
cctaagccagggattgtgggttcgagtcccacctggggtgtcg

SEQ ID NO: 46909 - DNA, 43 bp, Artificial Sequence; identical to SEQ ID NO: 4856
  Probe

SEQ ID NO: 46910 - DNA, 24 bp, Artificial Sequence
  Probe
cctagccccaaacccactccacct

SEQ ID NO: 46911 - DNA, 18 bp, Artificial Sequence
  Probe
cctagcctttctattagc

SEQ ID NO: 46912 - DNA, 22 bp, Artificial Sequence
  Probe
cctattctcaaactttaaatgg

SEQ ID NO: 46913 - DNA, 17 bp, Artificial Sequence
  Probe
cctcaaagcaatacact

SEQ ID NO: 46914 - DNA, 19 bp, Artificial Sequence
  Probe
cctcaaagcaatacactga

SEQ ID NO: 46915 - DNA, 32 bp, Artificial Sequence; identical to SEQ ID NO: 4861
  Probe

SEQ ID NO: 46916 - DNA, 50 bp, Artificial Sequence; identical to SEQ ID NO: 691
  Probe

SEQ ID NO: 46917 - DNA, 24 bp, Artificial Sequence
  Probe
cctcacacgcgaaaggtccccggt

SEQ ID NO: 46918 - DNA, 45 bp, Artificial Sequence
  Probe
cctcacacgcgaaaggtccccggttcgaaaccgggcggaaacacc

SEQ ID NO: 46919 - DNA, 23 bp, Artificial Sequence
  Probe
cctcacacggggcacaataattt

SEQ ID NO: 46920 - DNA, 20 bp, Artificial Sequence
  Probe
cctcagaaggtctcactttt

SEQ ID NO: 46921 - DNA, 25 bp, Artificial Sequence
  Probe
cctcatttacataaatattatacta

SEQ ID NO: 46922 - DNA, 16 bp, Artificial Sequence
  Probe
cctcctcaaagcaata

SEQ ID NO: 46923 - DNA, 18 bp, Artificial Sequence
  Probe
cctcctcaaagcaataca

SEQ ID NO: 46924 - DNA, 20 bp, Artificial Sequence
  Probe
cctcctcaaagcaatacact

SEQ ID NO: 46925 - DNA, 22 bp, Artificial Sequence
  Probe
cctcgttagtatagtggtgagt

SEQ ID NO: 46926 - DNA, 31 bp, Artificial Sequence; identical to SEQ ID NO: 18793
  Probe

SEQ ID NO: 46927 - DNA, 26 bp, Artificial Sequence
  Probe
cctgagttcgaacctcagagggggca

SEQ ID NO: 46928 - DNA, 29 bp, Artificial Sequence
  Probe
cctgagttcgaacctcagagggggcaagg

SEQ ID NO: 46929 - DNA, 28 bp, Artificial Sequence
  Probe
cctgagttcgaacctcagagggggcagc

SEQ ID NO: 46930 - DNA, 29 bp, Artificial Sequence
  Probe
cctgagttcgaacctcagagggggcagct

SEQ ID NO: 46931 - DNA, 28 bp, Artificial Sequence
  Probe
cctgagttcgagcctcagagagggcagc

SEQ ID NO: 46932 - DNA, 29 bp, Artificial Sequence
  Probe
cctgagttcgagcctcagagagggcagct

SEQ ID NO: 46933 - DNA, 23 bp, Artificial Sequence
  Probe
cctgccacgcgggaggcccgggt

SEQ ID NO: 46934 - DNA, 50 bp, Artificial Sequence; identical to SEQ ID NO: 39222
  Probe

SEQ ID NO: 46935 - DNA, 22 bp, Artificial Sequence
  Probe
cctggcccaacccgtcatctac

SEQ ID NO: 46936 - DNA, 26 bp, Artificial Sequence
  Probe
cctgggttcgaatcccagcggggcct

SEQ ID NO: 46937 - DNA, 27 bp, Artificial Sequence
  Probe
cctgggttcgaatcccagcggggcctg

SEQ ID NO: 46938 - DNA, 27 bp, Artificial Sequence
  Probe
cctgggttcgaatcccagcggggcctt

SEQ ID NO: 46939 - DNA, 26 bp, Artificial Sequence
  Probe
cctgggttcgaatcccagcggtgcct

SEQ ID NO: 46940 - DNA, 29 bp, Artificial Sequence
  Probe
cctgggttcgaatcccagcggtgcctccg

SEQ ID NO: 46941 - DNA, 27 bp, Artificial Sequence
  Probe
cctgggttcgagccccagtggaaccac

SEQ ID NO: 46942 - DNA, 28 bp, Artificial Sequence
  Probe
cctgggttcgagccccagtggaaccacg

SEQ ID NO: 46943 - DNA, 29 bp, Artificial Sequence
  Probe
cctgggttcgagccccagtggaaccacgg

SEQ ID NO: 46944 - DNA, 27 bp, Artificial Sequence
  Probe
cctggtggtctagtggttaggattcgg

SEQ ID NO: 46945 - DNA, 16 bp, Artificial Sequence
  Probe
cctgtcacgcgggaga

SEQ ID NO: 46946 - DNA, 18 bp, Artificial Sequence
  Probe
cctgtcacgcgggagacc

SEQ ID NO: 46947 - DNA, 22 bp, Artificial Sequence
  Probe
cctgtcacgcgggagaccgggg

SEQ ID NO: 46948 - DNA, 25 bp, Artificial Sequence
  Probe
cctgtcacgcgggagaccggggttc

SEQ ID NO: 46949 - DNA, 39 bp, Artificial Sequence; identical to SEQ ID NO: 13079
  Probe

SEQ ID NO: 46950 - DNA, 41 bp, Artificial Sequence; identical to SEQ ID NO: 36523
  Probe

SEQ ID NO: 46951 - DNA, 42 bp, Artificial Sequence; identical to SEQ ID NO: 36524
  Probe

SEQ ID NO: 46952 - DNA, 43 bp, Artificial Sequence; identical to SEQ ID NO: 39243
  Probe

SEQ ID NO: 46953 - DNA, 45 bp, Artificial Sequence; identical to SEQ ID NO: 4880
  Probe

SEQ ID NO: 46954 - DNA, 48 bp, Artificial Sequence
  Probe
cctgtcacgcgggagaccggggttcaattccccgacggggaggtgtgt

SEQ ID NO: 46955 - DNA, 50 bp, Artificial Sequence; identical to SEQ ID NO: 4881
  Probe

SEQ ID NO: 46956 - DNA, 38 bp, Artificial Sequence; identical to SEQ ID NO: 13081
  Probe

SEQ ID NO: 46957 - DNA, 40 bp, Artificial Sequence; identical to SEQ ID NO: 13083
  Probe

SEQ ID NO: 46958 - DNA, 43 bp, Artificial Sequence; identical to SEQ ID NO: 18830
  Probe

SEQ ID NO: 46959 - DNA, 45 bp, Artificial Sequence; identical to SEQ ID NO: 4883
  Probe

SEQ ID NO: 46960 - DNA, 50 bp, Artificial Sequence; identical to SEQ ID NO: 18832
  Probe

SEQ ID NO: 46961 - DNA, 45 bp, Artificial Sequence; identical to SEQ ID NO: 4885
  Probe

SEQ ID NO: 46962 - DNA, 50 bp, Artificial Sequence; identical to SEQ ID NO: 39263
  Probe

SEQ ID NO: 46963 - DNA, 43 bp, Artificial Sequence; identical to SEQ ID NO: 18834
  Probe

SEQ ID NO: 46964 - DNA, 45 bp, Artificial Sequence; identical to SEQ ID NO: 4886
  Probe

SEQ ID NO: 46965 - DNA, 48 bp, Artificial Sequence; identical to SEQ ID NO: 4887
  Probe

SEQ ID NO: 46966 - DNA, 49 bp, Artificial Sequence; identical to SEQ ID NO: 4888
  Probe

SEQ ID NO: 46967 - DNA, 50 bp, Artificial Sequence; identical to SEQ ID NO: 4889
  Probe

SEQ ID NO: 46968 - DNA, 50 bp, Artificial Sequence; identical to SEQ ID NO: 18839
  Probe

SEQ ID NO: 46969 - DNA, 45 bp, Artificial Sequence; identical to SEQ ID NO: 4890
  Probe

SEQ ID NO: 46970 - DNA, 50 bp, Artificial Sequence; identical to SEQ ID NO: 18841
  Probe

SEQ ID NO: 46971 - DNA, 50 bp, Artificial Sequence; identical to SEQ ID NO: 4891
  Probe

SEQ ID NO: 46972 - DNA, 20 bp, Artificial Sequence
  Probe
ccttaattttaataatcaac

SEQ ID NO: 46973 - DNA, 17 bp, Artificial Sequence
  Probe
ccttccaagcagttgac

SEQ ID NO: 46974 - DNA, 18 bp, Artificial Sequence
  Probe
ccttccaagcagttgacc

SEQ ID NO: 46975 - DNA, 22 bp, Artificial Sequence
  Probe
ccttccaagcagttgacccggg

SEQ ID NO: 46976 - DNA, 23 bp, Artificial Sequence
  Probe
ccttccaagcagttgacccgggt

SEQ ID NO: 46977 - DNA, 25 bp, Artificial Sequence
  Probe
ccttccaagcagttgacccgggttc

SEQ ID NO: 46978 - DNA, 45 bp, Artificial Sequence; identical to SEQ ID NO: 39289
  Probe

SEQ ID NO: 46979 - DNA, 45 bp, Artificial Sequence; identical to SEQ ID NO: 39294
  Probe

SEQ ID NO: 46980 - DNA, 16 bp, Artificial Sequence
  Probe
ccttcgatagctcagc

SEQ ID NO: 46981 - DNA, 17 bp, Artificial Sequence
  Probe
ccttcgatagctcagct

SEQ ID NO: 46982 - DNA, 19 bp, Artificial Sequence
  Probe
ccttcgatagctcagctgg

SEQ ID NO: 46983 - DNA, 16 bp, Artificial Sequence
  Probe
ccttcgatagctcagt

SEQ ID NO: 46984 - DNA, 19 bp, Artificial Sequence
  Probe
ccttcgatagctcagttgg

SEQ ID NO: 46985 - DNA, 20 bp, Artificial Sequence
  Probe
ccttcgatagctcagttggt

SEQ ID NO: 46986 - DNA, 21 bp, Artificial Sequence
  Probe
ccttcgatagctcagttggta

SEQ ID NO: 46987 - DNA, 22 bp, Artificial Sequence
  Probe
ccttcgatagctcagttggtag

SEQ ID NO: 46988 - DNA, 23 bp, Artificial Sequence
  Probe
ccttcgatagctcagttggtaga

SEQ ID NO: 46989 - DNA, 27 bp, Artificial Sequence
  Probe
ccttttaagttaaagattaagagaacc

SEQ ID NO: 46990 - DNA, 45 bp, Artificial Sequence
  Probe
ccttttaagttaaagattaagagaaccaacacctctttacagtga

SEQ ID NO: 46991 - DNA, 50 bp, Artificial Sequence; identical to SEQ ID NO: 4905
  Probe

SEQ ID NO: 46992 - DNA, 23 bp, Artificial Sequence
  Probe
ccttttttcccggcggcgggaga

SEQ ID NO: 46993 - DNA, 24 bp, Artificial Sequence
  Probe
ccttttttcccggcggcgggagaa

SEQ ID NO: 46994 - DNA, 26 bp, Artificial Sequence
  Probe
ccttttttcccggcggcgggagaagt

SEQ ID NO: 46995 - DNA, 24 bp, Artificial Sequence
  Probe
cgaaaatgttggttatacccttcc

SEQ ID NO: 46996 - DNA, 25 bp, Artificial Sequence
  Probe
cgaaaatgttggttatacccttccc

SEQ ID NO: 46997 - DNA, 26 bp, Artificial Sequence
  Probe
cgaaaatgttggttatacccttcccg

SEQ ID NO: 46998 - DNA, 27 bp, Artificial Sequence
  Probe
cgaaaatgttggttatacccttcccgt

SEQ ID NO: 46999 - DNA, 32 bp, Artificial Sequence; identical to SEQ ID NO: 4915
  Probe

SEQ ID NO: 47000 - DNA, 33 bp, Artificial Sequence; identical to SEQ ID NO: 4916
  Probe

SEQ ID NO: 47001 - DNA, 34 bp, Artificial Sequence; identical to SEQ ID NO: 4917
  Probe

SEQ ID NO: 47002 - DNA, 17 bp, Artificial Sequence
  Probe
cgaaaccatcctctgct

SEQ ID NO: 47003 - DNA, 21 bp, Artificial Sequence
  Probe
cgaaaccatcctctgctaggt

SEQ ID NO: 47004 - DNA, 18 bp, Artificial Sequence
  Probe
cgaaaccgggcggaaaca

SEQ ID NO: 47005 - DNA, 21 bp, Artificial Sequence
  Probe
cgaaaccgggcggaaacacct

SEQ ID NO: 47006 - DNA, 30 bp, Artificial Sequence
  Probe
cgaaaggtccccggttcgaaaccgggcgga

SEQ ID NO: 47007 - DNA, 34 bp, Artificial Sequence
  Probe
cgaaaggtccccggttcgaaaccgggcggaaaca

SEQ ID NO: 47008 - DNA, 36 bp, Artificial Sequence
  Probe
cgaaaggtccccggttcgaaaccgggcggaaacacc

SEQ ID NO: 47009 - DNA, 37 bp, Artificial Sequence; identical to SEQ ID NO: 4922
  Probe

SEQ ID NO: 47010 - DNA, 35 bp, Artificial Sequence
  Probe
cgaaaggttggtggttcgagcccacccagggacgc

SEQ ID NO: 47011 - DNA, 36 bp, Artificial Sequence; identical to SEQ ID NO: 18883
  Probe

SEQ ID NO: 47012 - DNA, 37 bp, Artificial Sequence; identical to SEQ ID NO: 4923
  Probe

SEQ ID NO: 47013 - DNA, 32 bp, Artificial Sequence
  Probe
cgaaaggttggtggttcgatcccacccaggga

SEQ ID NO: 47014 - DNA, 50 bp, Artificial Sequence
  Probe
cgaaccagagtgtagcttaacacaaagcacccaacttacacttaggagat

SEQ ID NO: 47015 - DNA, 21 bp, Artificial Sequence
  Probe
cgaaccccgtccgtgcctgat

SEQ ID NO: 47016 - DNA, 19 bp, Artificial Sequence
  Probe
cgaacctcagagggggcaa

SEQ ID NO: 47017 - DNA, 19 bp, Artificial Sequence
  Probe
cgaacctcagagggggcag

SEQ ID NO: 47018 - DNA, 21 bp, Artificial Sequence
  Probe
cgaacctcagagggggcagct

SEQ ID NO: 47019 - DNA, 28 bp, Artificial Sequence
  Probe
cgaacctcagagggggcagctgccattt

SEQ ID NO: 47020 - DNA, 20 bp, Artificial Sequence
  Probe
cgaagaagcagcttcaaacc

SEQ ID NO: 47021 - DNA, 27 bp, Artificial Sequence
  Probe
cgaagaagcagcttcaaacctgccggg

SEQ ID NO: 47022 - DNA, 28 bp, Artificial Sequence
  Probe
cgaagaagcagcttcaaacctgccgggg

SEQ ID NO: 47023 - DNA, 29 bp, Artificial Sequence
  Probe
cgaagaagcagcttcaaacctgccggggc

SEQ ID NO: 47024 - DNA, 30 bp, Artificial Sequence; identical to SEQ ID NO: 4930
  Probe

SEQ ID NO: 47025 - DNA, 31 bp, Artificial Sequence; identical to SEQ ID NO: 4931
  Probe

SEQ ID NO: 47026 - DNA, 32 bp, Artificial Sequence; identical to SEQ ID NO: 4932
  Probe

SEQ ID NO: 47027 - DNA, 33 bp, Artificial Sequence; identical to SEQ ID NO: 4933
  Probe

SEQ ID NO: 47028 - DNA, 34 bp, Artificial Sequence; identical to SEQ ID NO: 4934
  Probe

SEQ ID NO: 47029 - DNA, 36 bp, Artificial Sequence; identical to SEQ ID NO: 4936
  Probe

SEQ ID NO: 47030 - DNA, 44 bp, Artificial Sequence
  Probe
cgaagaagcagcttcaaacctgccggggcttctcccgccttttt

SEQ ID NO: 47031 - DNA, 21 bp, Artificial Sequence
  Probe
cgaatcacgtcggggtcaaac

SEQ ID NO: 47032 - DNA, 18 bp, Artificial Sequence
  Probe
cgaatcccaccgctgcca

SEQ ID NO: 47033 - DNA, 20 bp, Artificial Sequence
  Probe
cgaatcccaccgctgccaca

SEQ ID NO: 47034 - DNA, 21 bp, Artificial Sequence
  Probe
cgaatcccaccgctgccacac

SEQ ID NO: 47035 - DNA, 21 bp, Artificial Sequence
  Probe
cgaatcccaccgctgccaggt

SEQ ID NO: 47036 - DNA, 18 bp, Artificial Sequence
  Probe
cgaatcccactcctgaca

SEQ ID NO: 47037 - DNA, 18 bp, Artificial Sequence
  Probe
cgaatcccacttctgaca

SEQ ID NO: 47038 - DNA, 21 bp, Artificial Sequence
  Probe
cgaatcccacttctgacacaa

SEQ ID NO: 47039 - DNA, 26 bp, Artificial Sequence
  Probe
cgaatcccacttctgacacatacttt

SEQ ID NO: 47040 - DNA, 19 bp, Artificial Sequence
  Probe
cgaatcccagcggggcctg

SEQ ID NO: 47041 - DNA, 19 bp, Artificial Sequence
  Probe
cgaatcccagcggggcctt

SEQ ID NO: 47042 - DNA, 21 bp, Artificial Sequence
  Probe
cgaatcccagcggtgcctccg

SEQ ID NO: 47043 - DNA, 16 bp, Artificial Sequence
  Probe
cgaatcccatcctcgt

SEQ ID NO: 47044 - DNA, 20 bp, Artificial Sequence
  Probe
cgaatcccatcctcgtcgct

SEQ ID NO: 47045 - DNA, 21 bp, Artificial Sequence
  Probe
cgaatccggctcgaaggacga

SEQ ID NO: 47046 - DNA, 20 bp, Artificial Sequence
  Probe
cgaatcctgccgactacggc

SEQ ID NO: 47047 - DNA, 21 bp, Artificial Sequence
  Probe
cgaatcctgccgactacggca

SEQ ID NO: 47048 - DNA, 20 bp, Artificial Sequence
  Probe
cgaatcctgccgactacgtc

SEQ ID NO: 47049 - DNA, 21 bp, Artificial Sequence
  Probe
cgaatcctgccgactacgtca

SEQ ID NO: 47050 - DNA, 21 bp, Artificial Sequence
  Probe
cgaatcctgctcacagcgtca

SEQ ID NO: 47051 - DNA, 50 bp, Artificial Sequence
  Probe
cgaatgatttcgactcattaaattatgataatcatatttaccaaatgccc

SEQ ID NO: 47052 - DNA, 17 bp, Artificial Sequence
  Probe
cgaccccttatttaccg

SEQ ID NO: 47053 - DNA, 28 bp, Artificial Sequence
  Probe
cgactcattaaattatgataatcatatt

SEQ ID NO: 47054 - DNA, 32 bp, Artificial Sequence; identical to SEQ ID NO: 4942
  Probe

SEQ ID NO: 47055 - DNA, 35 bp, Artificial Sequence; identical to SEQ ID NO: 4943
  Probe

SEQ ID NO: 47056 - DNA, 36 bp, Artificial Sequence
  Probe
cgactcattaaattatgataatcatatttaccaaat

SEQ ID NO: 47057 - DNA, 37 bp, Artificial Sequence; identical to SEQ ID NO: 4944
  Probe

SEQ ID NO: 47058 - DNA, 38 bp, Artificial Sequence
  Probe
cgactcattaaattatgataatcatatttaccaaatgc

SEQ ID NO: 47059 - DNA, 21 bp, Artificial Sequence
  Probe
cgactcccggtatgggaacaa

SEQ ID NO: 47060 - DNA, 18 bp, Artificial Sequence
  Probe
cgactcccggtgtgggaa

SEQ ID NO: 47061 - DNA, 20 bp, Artificial Sequence
  Probe
cgactcccggtgtgggaacg

SEQ ID NO: 47062 - DNA, 21 bp, Artificial Sequence
  Probe
cgactcccggtgtgggaacgc

SEQ ID NO: 47063 - DNA, 34 bp, Artificial Sequence; identical to SEQ ID NO: 18942
  Probe

SEQ ID NO: 47064 - DNA, 35 bp, Artificial Sequence; identical to SEQ ID NO: 13093
  Probe

SEQ ID NO: 47065 - DNA, 36 bp, Artificial Sequence; identical to SEQ ID NO: 18943
  Probe

SEQ ID NO: 47066 - DNA, 37 bp, Artificial Sequence; identical to SEQ ID NO: 18944
  Probe

SEQ ID NO: 47067 - DNA, 16 bp, Artificial Sequence
  Probe
cgagcccacccaggga

SEQ ID NO: 47068 - DNA, 21 bp, Artificial Sequence
  Probe
cgagcccacccagggacgcct

SEQ ID NO: 47069 - DNA, 32 bp, Artificial Sequence
  Probe
cgagccccacgttgggcgcgggttgtaacttt

SEQ ID NO: 47070 - DNA, 26 bp, Artificial Sequence
  Probe
cgagccccacgttgggcgctgtgttt

SEQ ID NO: 47071 - DNA, 18 bp, Artificial Sequence
  Probe
cgagccccagtggaacca

SEQ ID NO: 47072 - DNA, 20 bp, Artificial Sequence
  Probe
cgagccccagtggaaccacg

SEQ ID NO: 47073 - DNA, 35 bp, Artificial Sequence; identical to SEQ ID NO: 18971
  Probe

SEQ ID NO: 47074 - DNA, 32 bp, Artificial Sequence
  Probe
cgaggttgtgagttcgatcctcacctggagca

SEQ ID NO: 47075 - DNA, 21 bp, Artificial Sequence
  Probe
cgagtcccatctgggtcgcgt

SEQ ID NO: 47076 - DNA, 21 bp, Artificial Sequence
  Probe
cgagtcccttcgtggtcgttg

SEQ ID NO: 47077 - DNA, 18 bp, Artificial Sequence
  Probe
cgatccccagcatctcca

SEQ ID NO: 47078 - DNA, 25 bp, Artificial Sequence
  Probe
cgatccccagcatctccagtgtttt

SEQ ID NO: 47079 - DNA, 20 bp, Artificial Sequence
  Probe
cgatccccggcatctccatt

SEQ ID NO: 47080 - DNA, 21 bp, Artificial Sequence
  Probe
cgatccccggcatctccattg

SEQ ID NO: 47081 - DNA, 21 bp, Artificial Sequence
  Probe
cgatccccgtacgggccacga

SEQ ID NO: 47082 - DNA, 21 bp, Artificial Sequence
  Probe
cgatccccgtacgggccactg

SEQ ID NO: 47083 - DNA, 18 bp, Artificial Sequence
  Probe
cgatcccgggtttcggca

SEQ ID NO: 47084 - DNA, 29 bp, Artificial Sequence
  Probe
cgatccgagttcaaatctcggtggaacct

SEQ ID NO: 47085 - DNA, 32 bp, Artificial Sequence; identical to SEQ ID NO: 4954
  Probe

SEQ ID NO: 47086 - DNA, 26 bp, Artificial Sequence
  Probe
cgatccgagttcaaatctcggtggga

SEQ ID NO: 47087 - DNA, 27 bp, Artificial Sequence
  Probe
cgatccgagttcaaatctcggtgggac

SEQ ID NO: 47088 - DNA, 29 bp, Artificial Sequence
  Probe
cgatccgagttcaaatctcggtgggacct

SEQ ID NO: 47089 - DNA, 32 bp, Artificial Sequence; identical to SEQ ID NO: 39334
  Probe

SEQ ID NO: 47090 - DNA, 21 bp, Artificial Sequence
  Probe
cgatcctcacacggggcacaa

SEQ ID NO: 47091 - DNA, 27 bp, Artificial Sequence
  Probe
cgatcctcacacggggcacaataattt

SEQ ID NO: 47092 - DNA, 20 bp, Artificial Sequence
  Probe
cgatgcccgcatcctccact

SEQ ID NO: 47093 - DNA, 21 bp, Artificial Sequence
  Probe
cgatgcccgcatcctccactc

SEQ ID NO: 47094 - DNA, 25 bp, Artificial Sequence
  Probe
cgatggatcgaaaccatcctctgct

SEQ ID NO: 47095 - DNA, 26 bp, Artificial Sequence
  Probe
cgatggatcgaaaccatcctctgcta

SEQ ID NO: 47096 - DNA, 28 bp, Artificial Sequence
  Probe
cgatggatcgaaaccatcctctgctagg

SEQ ID NO: 47097 - DNA, 29 bp, Artificial Sequence
  Probe
cgatggatcgaaaccatcctctgctaggt

SEQ ID NO: 47098 - DNA, 28 bp, Artificial Sequence
  Probe
cgatggatcgaaaccatcctctgctatc

SEQ ID NO: 47099 - DNA, 28 bp, Artificial Sequence
  Probe
cgatggatcgaaaccatcctctgctatt

SEQ ID NO: 47100 - DNA, 18 bp, Artificial Sequence
  Probe
cgattccccgacggggag

SEQ ID NO: 47101 - DNA, 19 bp, Artificial Sequence
  Probe
cgattccccgacggggaga

SEQ ID NO: 47102 - DNA, 19 bp, Artificial Sequence
  Probe
cgattccccgacggggagg

SEQ ID NO: 47103 - DNA, 21 bp, Artificial Sequence
  Probe
cgattccccgacggggaggca

SEQ ID NO: 47104 - DNA, 21 bp, Artificial Sequence
  Probe
cgattcccggccaacgcaagt

SEQ ID NO: 47105 - DNA, 21 bp, Artificial Sequence
  Probe
cgattcccggccaacgcagtg

SEQ ID NO: 47106 - DNA, 21 bp, Artificial Sequence
  Probe
cgattcccggccaatgcacga

SEQ ID NO: 47107 - DNA, 21 bp, Artificial Sequence
  Probe
cgattcccggccaatgcagca

SEQ ID NO: 47108 - DNA, 21 bp, Artificial Sequence
  Probe
cgattcccggcccatgcagca

SEQ ID NO: 47109 - DNA, 21 bp, Artificial Sequence
  Probe
cgattcccgggcggcgcactt

SEQ ID NO: 47110 - DNA, 21 bp, Artificial Sequence
  Probe
cgattcccggtcagggaacaa

SEQ ID NO: 47111 - DNA, 21 bp, Artificial Sequence
  Probe
cgattcccggtcatggaacca

SEQ ID NO: 47112 - DNA, 21 bp, Artificial Sequence
  Probe
cgattcctggtcagggaacca

SEQ ID NO: 47113 - DNA, 20 bp, Artificial Sequence
  Probe
cgattccttccttttttgtc

SEQ ID NO: 47114 - DNA, 19 bp, Artificial Sequence
  Probe
cgattctcatagtcctaga

SEQ ID NO: 47115 - DNA, 20 bp, Artificial Sequence
  Probe
cgattctcatagtcctagaa

SEQ ID NO: 47116 - DNA, 21 bp, Artificial Sequence
  Probe
cgattctcatagtcctagaaa

SEQ ID NO: 47117 - DNA, 26 bp, Artificial Sequence
  Probe
cgcacaggttcgaatcctgttcgtga

SEQ ID NO: 47118 - DNA, 37 bp, Artificial Sequence; identical to SEQ ID NO: 13098
  Probe

SEQ ID NO: 47119 - DNA, 38 bp, Artificial Sequence; identical to SEQ ID NO: 4966
  Probe

SEQ ID NO: 47120 - DNA, 39 bp, Artificial Sequence; identical to SEQ ID NO: 4967
  Probe

SEQ ID NO: 47121 - DNA, 39 bp, Artificial Sequence; identical to SEQ ID NO: 4968
  Probe

SEQ ID NO: 47122 - DNA, 31 bp, Artificial Sequence; identical to SEQ ID NO: 19030
  Probe

SEQ ID NO: 47123 - DNA, 32 bp, Artificial Sequence; identical to SEQ ID NO: 4969
  Probe

SEQ ID NO: 47124 - DNA, 33 bp, Artificial Sequence
  Probe
cgcagcaacctcggttcgaatccgagtcacggc

SEQ ID NO: 47125 - DNA, 34 bp, Artificial Sequence
  Probe
cgcagcaacctcggttcgaatccgagtcacggca

SEQ ID NO: 47126 - DNA, 35 bp, Artificial Sequence
  Probe
cgcagcaacctcggttcgaatccgagtcacggcaa

SEQ ID NO: 47127 - DNA, 36 bp, Artificial Sequence; identical to SEQ ID NO: 19032
  Probe

SEQ ID NO: 47128 - DNA, 37 bp, Artificial Sequence; identical to SEQ ID NO: 4970
  Probe

SEQ ID NO: 47129 - DNA, 36 bp, Artificial Sequence; identical to SEQ ID NO: 19033
  Probe

SEQ ID NO: 47130 - DNA, 37 bp, Artificial Sequence; identical to SEQ ID NO: 4972
  Probe

SEQ ID NO: 47131 - DNA, 36 bp, Artificial Sequence; identical to SEQ ID NO: 19035
  Probe

SEQ ID NO: 47132 - DNA, 37 bp, Artificial Sequence; identical to SEQ ID NO: 4973
  Probe

SEQ ID NO: 47133 - DNA, 23 bp, Artificial Sequence
  Probe
cgcataaaacttaaaactttaca

SEQ ID NO: 47134 - DNA, 28 bp, Artificial Sequence
  Probe
cgcataaaacttaaaactttacagtcag

SEQ ID NO: 47135 - DNA, 30 bp, Artificial Sequence; identical to SEQ ID NO: 30334
  Probe

SEQ ID NO: 47136 - DNA, 31 bp, Artificial Sequence
  Probe
cgcataaaacttaaaactttacagtcagagg

SEQ ID NO: 47137 - DNA, 35 bp, Artificial Sequence
  Probe
cgcataaaacttaaaactttacagtcagaggttca

SEQ ID NO: 47138 - DNA, 44 bp, Artificial Sequence; identical to SEQ ID NO: 717
  Probe

SEQ ID NO: 47139 - DNA, 50 bp, Artificial Sequence; identical to SEQ ID NO: 4981
  Probe

SEQ ID NO: 47140 - DNA, 32 bp, Artificial Sequence
  Probe
cgcattggtggttcagtggtagaattctcgcc

SEQ ID NO: 47141 - DNA, 33 bp, Artificial Sequence; identical to SEQ ID NO: 4982
  Probe

SEQ ID NO: 47142 - DNA, 32 bp, Artificial Sequence; identical to SEQ ID NO: 19041
  Probe

SEQ ID NO: 47143 - DNA, 35 bp, Artificial Sequence
  Probe
cgccaaggtcgcgggttcgatccccgtacgggcca

SEQ ID NO: 47144 - DNA, 38 bp, Artificial Sequence; identical to SEQ ID NO: 19045
  Probe

SEQ ID NO: 47145 - DNA, 38 bp, Artificial Sequence; identical to SEQ ID NO: 19046
  Probe

SEQ ID NO: 47146 - DNA, 32 bp, Artificial Sequence; identical to SEQ ID NO: 19053
  Probe

SEQ ID NO: 47147 - DNA, 33 bp, Artificial Sequence; identical to SEQ ID NO: 719
  Probe

SEQ ID NO: 47148 - DNA, 34 bp, Artificial Sequence; identical to SEQ ID NO: 720
  Probe

SEQ ID NO: 47149 - DNA, 35 bp, Artificial Sequence; identical to SEQ ID NO: 19056
  Probe

SEQ ID NO: 47150 - DNA, 36 bp, Artificial Sequence; identical to SEQ ID NO: 19057
  Probe

SEQ ID NO: 47151 - DNA, 32 bp, Artificial Sequence
  Probe
cgcccggctagctcagtcggtagagcatgaga

SEQ ID NO: 47152 - DNA, 32 bp, Artificial Sequence; identical to SEQ ID NO: 39346
  Probe

SEQ ID NO: 47153 - DNA, 33 bp, Artificial Sequence
  Probe
cgcccggctagctcagtcggtagagcatgggac

SEQ ID NO: 47154 - DNA, 34 bp, Artificial Sequence; identical to SEQ ID NO: 721
  Probe

SEQ ID NO: 47155 - DNA, 32 bp, Artificial Sequence; identical to SEQ ID NO: 30351
  Probe

SEQ ID NO: 47156 - DNA, 34 bp, Artificial Sequence; identical to SEQ ID NO: 19062
  Probe

SEQ ID NO: 47157 - DNA, 35 bp, Artificial Sequence; identical to SEQ ID NO: 4985
  Probe

SEQ ID NO: 47158 - DNA, 35 bp, Artificial Sequence; identical to SEQ ID NO: 4986
  Probe

SEQ ID NO: 47159 - DNA, 35 bp, Artificial Sequence; identical to SEQ ID NO: 4989
  Probe

SEQ ID NO: 47160 - DNA, 37 bp, Artificial Sequence; identical to SEQ ID NO: 4990
  Probe

SEQ ID NO: 47161 - DNA, 25 bp, Artificial Sequence
  Probe
cgccgctggtgtagtggtatcatgc

SEQ ID NO: 47162 - DNA, 32 bp, Artificial Sequence; identical to SEQ ID NO: 723
  Probe

SEQ ID NO: 47163 - DNA, 33 bp, Artificial Sequence; identical to SEQ ID NO: 4993
  Probe

SEQ ID NO: 47164 - DNA, 34 bp, Artificial Sequence; identical to SEQ ID NO: 724
  Probe

SEQ ID NO: 47165 - DNA, 17 bp, Artificial Sequence
  Probe
cgccgtgatcgtatagt

SEQ ID NO: 47166 - DNA, 18 bp, Artificial Sequence
  Probe
cgccgtgatcgtatagtg

SEQ ID NO: 47167 - DNA, 19 bp, Artificial Sequence
  Probe
cgccgtgatcgtatagtgg

SEQ ID NO: 47168 - DNA, 20 bp, Artificial Sequence
  Probe
cgccgtgatcgtatagtggt

SEQ ID NO: 47169 - DNA, 21 bp, Artificial Sequence
  Probe
cgccgtgatcgtatagtggtt

SEQ ID NO: 47170 - DNA, 22 bp, Artificial Sequence
  Probe
cgccgtgatcgtatagtggtta

SEQ ID NO: 47171 - DNA, 23 bp, Artificial Sequence
  Probe
cgccgtgatcgtatagtggttag

SEQ ID NO: 47172 - DNA, 24 bp, Artificial Sequence
  Probe
cgccgtgatcgtatagtggttagt

SEQ ID NO: 47173 - DNA, 27 bp, Artificial Sequence
  Probe
cgccgtgatcgtatagtggttagtact

SEQ ID NO: 47174 - DNA, 31 bp, Artificial Sequence; identical to SEQ ID NO: 19077
  Probe

SEQ ID NO: 47175 - DNA, 32 bp, Artificial Sequence; identical to SEQ ID NO: 4998
  Probe

SEQ ID NO: 47176 - DNA, 33 bp, Artificial Sequence; identical to SEQ ID NO: 4999
  Probe

SEQ ID NO: 47177 - DNA, 34 bp, Artificial Sequence; identical to SEQ ID NO: 5000
  Probe

SEQ ID NO: 47178 - DNA, 35 bp, Artificial Sequence; identical to SEQ ID NO: 5001
  Probe

SEQ ID NO: 47179 - DNA, 36 bp, Artificial Sequence; identical to SEQ ID NO: 5002
  Probe

SEQ ID NO: 47180 - DNA, 37 bp, Artificial Sequence; identical to SEQ ID NO: 5003
  Probe

SEQ ID NO: 47181 - DNA, 39 bp, Artificial Sequence; identical to SEQ ID NO: 19085
  Probe

SEQ ID NO: 47182 - DNA, 40 bp, Artificial Sequence; identical to SEQ ID NO: 19086
  Probe

SEQ ID NO: 47183 - DNA, 50 bp, Artificial Sequence; identical to SEQ ID NO: 30378
  Probe

SEQ ID NO: 47184 - DNA, 23 bp, Artificial Sequence
  Probe
cgcctgtcacgcgggagaccggg

SEQ ID NO: 47185 - DNA, 25 bp, Artificial Sequence
  Probe
cgcctgtcacgcgggagaccggggt

SEQ ID NO: 47186 - DNA, 41 bp, Artificial Sequence; identical to SEQ ID NO: 13113
  Probe

SEQ ID NO: 47187 - DNA, 44 bp, Artificial Sequence
  Probe
cgcctgtcacgcgggagaccggggttcaattccccgacggggag

SEQ ID NO: 47188 - DNA, 50 bp, Artificial Sequence; identical to SEQ ID NO: 5005
  Probe

SEQ ID NO: 47189 - DNA, 40 bp, Artificial Sequence; identical to SEQ ID NO: 13118
  Probe

SEQ ID NO: 47190 - DNA, 42 bp, Artificial Sequence; identical to SEQ ID NO: 13120
  Probe

SEQ ID NO: 47191 - DNA, 43 bp, Artificial Sequence; identical to SEQ ID NO: 13121
  Probe

SEQ ID NO: 47192 - DNA, 45 bp, Artificial Sequence; identical to SEQ ID NO: 19102
  Probe

SEQ ID NO: 47193 - DNA, 50 bp, Artificial Sequence; identical to SEQ ID NO: 19104
  Probe

SEQ ID NO: 47194 - DNA, 45 bp, Artificial Sequence; identical to SEQ ID NO: 19106
  Probe

SEQ ID NO: 47195 - DNA, 50 bp, Artificial Sequence; identical to SEQ ID NO: 19107
  Probe

SEQ ID NO: 47196 - DNA, 48 bp, Artificial Sequence
  Probe
cgcctgtcacgcgggagaccggggttcgattccccgacggggaggcac

SEQ ID NO: 47197 - DNA, 49 bp, Artificial Sequence; identical to SEQ ID NO: 19109
  Probe

SEQ ID NO: 47198 - DNA, 50 bp, Artificial Sequence; identical to SEQ ID NO: 5007
  Probe

SEQ ID NO: 47199 - DNA, 50 bp, Artificial Sequence; identical to SEQ ID NO: 5008
  Probe

SEQ ID NO: 47200 - DNA, 50 bp, Artificial Sequence; identical to SEQ ID NO: 5009
  Probe

SEQ ID NO: 47201 - DNA, 50 bp, Artificial Sequence; identical to SEQ ID NO: 19115
  Probe

SEQ ID NO: 47202 - DNA, 22 bp, Artificial Sequence
  Probe
cgccttaattttaataatcaac

SEQ ID NO: 47203 - DNA, 25 bp, Artificial Sequence
  Probe
cgccttttttcccggcggcgggaga

SEQ ID NO: 47204 - DNA, 26 bp, Artificial Sequence
  Probe
cgccttttttcccggcggcgggagaa

SEQ ID NO: 47205 - DNA, 27 bp, Artificial Sequence
  Probe
cgccttttttcccggcggcgggagaag

SEQ ID NO: 47206 - DNA, 28 bp, Artificial Sequence
  Probe
cgccttttttcccggcggcgggagaagt

SEQ ID NO: 47207 - DNA, 17 bp, Artificial Sequence
  Probe
cgcgaaaggtccccggt

SEQ ID NO: 47208 - DNA, 38 bp, Artificial Sequence
  Probe
cgcgaaaggtccccggttcgaaaccgggcggaaacacc

SEQ ID NO: 47209 - DNA, 39 bp, Artificial Sequence; identical to SEQ ID NO: 5017
  Probe

SEQ ID NO: 47210 - DNA, 27 bp, Artificial Sequence
  Probe
cgcgagttcaaatctcgctggggcctc

SEQ ID NO: 47211 - DNA, 28 bp, Artificial Sequence
  Probe
cgcgagttcaaatctcgctggggcctcg

SEQ ID NO: 47212 - DNA, 29 bp, Artificial Sequence
  Probe
cgcgagttcaaatctcgctggggcctcgg

SEQ ID NO: 47213 - DNA, 29 bp, Artificial Sequence
  Probe
cgcgagttcaaatctcgctggggcctgct

SEQ ID NO: 47214 - DNA, 27 bp, Artificial Sequence
  Probe
cgcgagttcaattctcgctggggcctg

SEQ ID NO: 47215 - DNA, 29 bp, Artificial Sequence
  Probe
cgcgagttcaattctcgctggggcctgtg

SEQ ID NO: 47216 - DNA, 27 bp, Artificial Sequence
  Probe
cgcgagttcgatcctcgctggggcctc

SEQ ID NO: 47217 - DNA, 26 bp, Artificial Sequence
  Probe
cgcgcaggttcgaatcctgctcacag

SEQ ID NO: 47218 - DNA, 31 bp, Artificial Sequence; identical to SEQ ID NO: 19132
  Probe

SEQ ID NO: 47219 - DNA, 32 bp, Artificial Sequence; identical to SEQ ID NO: 5019
  Probe

SEQ ID NO: 47220 - DNA, 32 bp, Artificial Sequence; identical to SEQ ID NO: 5020
  Probe

SEQ ID NO: 47221 - DNA, 32 bp, Artificial Sequence; identical to SEQ ID NO: 5021
  Probe

SEQ ID NO: 47222 - DNA, 34 bp, Artificial Sequence; identical to SEQ ID NO: 5022
  Probe

SEQ ID NO: 47223 - DNA, 18 bp, Artificial Sequence
  Probe
cgcgggagaccggggttc

SEQ ID NO: 47224 - DNA, 30 bp, Artificial Sequence; identical to SEQ ID NO: 13129
  Probe

SEQ ID NO: 47225 - DNA, 33 bp, Artificial Sequence; identical to SEQ ID NO: 13132
  Probe

SEQ ID NO: 47226 - DNA, 36 bp, Artificial Sequence; identical to SEQ ID NO: 5025
  Probe

SEQ ID NO: 47227 - DNA, 38 bp, Artificial Sequence; identical to SEQ ID NO: 5026
  Probe

SEQ ID NO: 47228 - DNA, 29 bp, Artificial Sequence
  Probe
cgcgggagaccggggttcgattccccgac

SEQ ID NO: 47229 - DNA, 36 bp, Artificial Sequence; identical to SEQ ID NO: 5028
  Probe

SEQ ID NO: 47230 - DNA, 38 bp, Artificial Sequence; identical to SEQ ID NO: 5030
  Probe

SEQ ID NO: 47231 - DNA, 37 bp, Artificial Sequence; identical to SEQ ID NO: 5031
  Probe

SEQ ID NO: 47232 - DNA, 38 bp, Artificial Sequence; identical to SEQ ID NO: 5032
  Probe

SEQ ID NO: 47233 - DNA, 38 bp, Artificial Sequence; identical to SEQ ID NO: 5033
  Probe

SEQ ID NO: 47234 - DNA, 36 bp, Artificial Sequence; identical to SEQ ID NO: 5034
  Probe

SEQ ID NO: 47235 - DNA, 37 bp, Artificial Sequence; identical to SEQ ID NO: 5035
  Probe

SEQ ID NO: 47236 - DNA, 37 bp, Artificial Sequence; identical to SEQ ID NO: 5036
  Probe

SEQ ID NO: 47237 - DNA, 38 bp, Artificial Sequence; identical to SEQ ID NO: 5037
  Probe

SEQ ID NO: 47238 - DNA, 38 bp, Artificial Sequence; identical to SEQ ID NO: 5039
  Probe

SEQ ID NO: 47239 - DNA, 16 bp, Artificial Sequence
  Probe
cgcgggaggcccgggt

SEQ ID NO: 47240 - DNA, 35 bp, Artificial Sequence; identical to SEQ ID NO: 13149
  Probe

SEQ ID NO: 47241 - DNA, 38 bp, Artificial Sequence; identical to SEQ ID NO: 19176
  Probe

SEQ ID NO: 47242 - DNA, 38 bp, Artificial Sequence; identical to SEQ ID NO: 19179
  Probe

SEQ ID NO: 47243 - DNA, 38 bp, Artificial Sequence; identical to SEQ ID NO: 5043
  Probe

SEQ ID NO: 47244 - DNA, 26 bp, Artificial Sequence
  Probe
cgcgggttcgatccccgtacgggcca

SEQ ID NO: 47245 - DNA, 27 bp, Artificial Sequence
  Probe
cgcgggttcgatccccgtacgggccac

SEQ ID NO: 47246 - DNA, 28 bp, Artificial Sequence
  Probe
cgcgggttcgatccccgtacgggccaca

SEQ ID NO: 47247 - DNA, 28 bp, Artificial Sequence
  Probe
cgcgggttcgatccccgtacgggccacg

SEQ ID NO: 47248 - DNA, 29 bp, Artificial Sequence
  Probe
cgcgggttcgatccccgtacgggccacga

SEQ ID NO: 47249 - DNA, 28 bp, Artificial Sequence
  Probe
cgcgggttcgatccccgtacgggccact

SEQ ID NO: 47250 - DNA, 29 bp, Artificial Sequence
  Probe
cgcgggttcgatccccgtacgggccactg

SEQ ID NO: 47251 - DNA, 28 bp, Artificial Sequence
  Probe
cgcgggttcgatccccgtacgggccagg

SEQ ID NO: 47252 - DNA, 29 bp, Artificial Sequence
  Probe
cgcgggttcgatccccgtacgggccaggc

SEQ ID NO: 47253 - DNA, 26 bp, Artificial Sequence
  Probe
cgcgggttcgatccccgtactggcca

SEQ ID NO: 47254 - DNA, 28 bp, Artificial Sequence
  Probe
cgcgggttcgatccccgtactggccacg

SEQ ID NO: 47255 - DNA, 29 bp, Artificial Sequence
  Probe
cgcgggttcgatccccgtactggccacgt

SEQ ID NO: 47256 - DNA, 26 bp, Artificial Sequence
  Probe
cgcgtgggttcgaatcccatcctcgt

SEQ ID NO: 47257 - DNA, 27 bp, Artificial Sequence
  Probe
cgcgtgggttcgaatcccatcctcgtc

SEQ ID NO: 47258 - DNA, 28 bp, Artificial Sequence
  Probe
cgcgtgggttcgaatcccatcctcgtcg

SEQ ID NO: 47259 - DNA, 42 bp, Artificial Sequence; identical to SEQ ID NO: 19192
  Probe

SEQ ID NO: 47260 - DNA, 46 bp, Artificial Sequence; identical to SEQ ID NO: 19193
  Probe

SEQ ID NO: 47261 - DNA, 46 bp, Artificial Sequence; identical to SEQ ID NO: 19194
  Probe

SEQ ID NO: 47262 - DNA, 27 bp, Artificial Sequence
  Probe
cgctggttcgaatccggctcgaaggac

SEQ ID NO: 47263 - DNA, 28 bp, Artificial Sequence
  Probe
cgctggttcgaatccggctcgaaggacg

SEQ ID NO: 47264 - DNA, 29 bp, Artificial Sequence
  Probe
cgctggttcgaatccggctcgaaggacga

SEQ ID NO: 47265 - DNA, 24 bp, Artificial Sequence
  Probe
cgctggttcgattccggctcgaag

SEQ ID NO: 47266 - DNA, 29 bp, Artificial Sequence
  Probe
cgctggttcgattccggctcgaaggaagt

SEQ ID NO: 47267 - DNA, 28 bp, Artificial Sequence
  Probe
cgctggttcgattccggctcgaaggact

SEQ ID NO: 47268 - DNA, 29 bp, Artificial Sequence
  Probe
cgctggttcgattccggctcgaaggactt

SEQ ID NO: 47269 - DNA, 29 bp, Artificial Sequence
  Probe
cgctggttcgattccggctcgaaggagac

SEQ ID NO: 47270 - DNA, 29 bp, Artificial Sequence
  Probe
cgctggttcgattccggctcgaaggagct

SEQ ID NO: 47271 - DNA, 49 bp, Artificial Sequence; identical to SEQ ID NO: 19203
  Probe

SEQ ID NO: 47272 - DNA, 22 bp, Artificial Sequence
  Probe
cggaagcgtgctgggcccataa

SEQ ID NO: 47273 - DNA, 32 bp, Artificial Sequence; identical to SEQ ID NO: 745
  Probe

SEQ ID NO: 47274 - DNA, 35 bp, Artificial Sequence; identical to SEQ ID NO: 748
  Probe

SEQ ID NO: 47275 - DNA, 39 bp, Artificial Sequence; identical to SEQ ID NO: 752
  Probe

SEQ ID NO: 47276 - DNA, 40 bp, Artificial Sequence; identical to SEQ ID NO: 5055
  Probe

SEQ ID NO: 47277 - DNA, 50 bp, Artificial Sequence; identical to SEQ ID NO: 19210
  Probe

SEQ ID NO: 47278 - DNA, 50 bp, Artificial Sequence
  Probe
cggagaattttggattctcagggatgggttcgattctcatagtcctagaa

SEQ ID NO: 47279 - DNA, 19 bp, Artificial Sequence
  Probe
cggagatgaaaaccttttt

SEQ ID NO: 47280 - DNA, 23 bp, Artificial Sequence
  Probe
cggagatgaaaacctttttccaa

SEQ ID NO: 47281 - DNA, 24 bp, Artificial Sequence
  Probe
cggagatgaaaacctttttccaag

SEQ ID NO: 47282 - DNA, 27 bp, Artificial Sequence
  Probe
cggagatgaaaacctttttccaaggac

SEQ ID NO: 47283 - DNA, 29 bp, Artificial Sequence
  Probe
cggagatgaaaacctttttccaaggacaa

SEQ ID NO: 47284 - DNA, 30 bp, Artificial Sequence; identical to SEQ ID NO: 5060
  Probe

SEQ ID NO: 47285 - DNA, 31 bp, Artificial Sequence; identical to SEQ ID NO: 5061
  Probe

SEQ ID NO: 47286 - DNA, 32 bp, Artificial Sequence; identical to SEQ ID NO: 5062
  Probe

SEQ ID NO: 47287 - DNA, 29 bp, Artificial Sequence
  Probe
cggatagctcagtcggtagagcatcagac

SEQ ID NO: 47288 - DNA, 30 bp, Artificial Sequence; identical to SEQ ID NO: 762
  Probe

SEQ ID NO: 47289 - DNA, 23 bp, Artificial Sequence
  Probe
cggcccgggttcgactcccggtg

SEQ ID NO: 47290 - DNA, 25 bp, Artificial Sequence
  Probe
cggcccgggttcgactcccggtgtg

SEQ ID NO: 47291 - DNA, 26 bp, Artificial Sequence
  Probe
cggcccgggttcgactcccggtgtgg

SEQ ID NO: 47292 - DNA, 27 bp, Artificial Sequence
  Probe
cggcccgggttcgactcccggtgtggg

SEQ ID NO: 47293 - DNA, 30 bp, Artificial Sequence; identical to SEQ ID NO: 766
  Probe

SEQ ID NO: 47294 - DNA, 32 bp, Artificial Sequence; identical to SEQ ID NO: 5067
  Probe

SEQ ID NO: 47295 - DNA, 23 bp, Artificial Sequence
  Probe
cggcccgggttcgattcccggtc

SEQ ID NO: 47296 - DNA, 27 bp, Artificial Sequence
  Probe
cggcccgggttcgattcccggtcaggg

SEQ ID NO: 47297 - DNA, 30 bp, Artificial Sequence; identical to SEQ ID NO: 5070
  Probe

SEQ ID NO: 47298 - DNA, 30 bp, Artificial Sequence; identical to SEQ ID NO: 5071
  Probe

SEQ ID NO: 47299 - DNA, 30 bp, Artificial Sequence; identical to SEQ ID NO: 5073
  Probe

SEQ ID NO: 47300 - DNA, 32 bp, Artificial Sequence; identical to SEQ ID NO: 5074
  Probe

SEQ ID NO: 47301 - DNA, 30 bp, Artificial Sequence; identical to SEQ ID NO: 771
  Probe

SEQ ID NO: 47302 - DNA, 31 bp, Artificial Sequence; identical to SEQ ID NO: 772
  Probe

SEQ ID NO: 47303 - DNA, 32 bp, Artificial Sequence; identical to SEQ ID NO: 773
  Probe

SEQ ID NO: 47304 - DNA, 33 bp, Artificial Sequence; identical to SEQ ID NO: 774
  Probe

SEQ ID NO: 47305 - DNA, 26 bp, Artificial Sequence
  Probe
cggctagctcagtcggtagagcatgg

SEQ ID NO: 47306 - DNA, 27 bp, Artificial Sequence
  Probe
cggctagctcagtcggtagagcatggg

SEQ ID NO: 47307 - DNA, 31 bp, Artificial Sequence; identical to SEQ ID NO: 779
  Probe

SEQ ID NO: 47308 - DNA, 33 bp, Artificial Sequence; identical to SEQ ID NO: 781
  Probe

SEQ ID NO: 47309 - DNA, 24 bp, Artificial Sequence
  Probe
cggctgttaaccgaaaggttggtg

SEQ ID NO: 47310 - DNA, 26 bp, Artificial Sequence
  Probe
cggctgttaaccgaaaggttggtggt

SEQ ID NO: 47311 - DNA, 46 bp, Artificial Sequence
  Probe
cggctgttaaccgaaaggttggtggttcgagcccacccagggacgc

SEQ ID NO: 47312 - DNA, 50 bp, Artificial Sequence
  Probe
cggctgttaaccgaaaggttggtggttcgagcccacccagggacgcctct

SEQ ID NO: 47313 - DNA, 50 bp, Artificial Sequence
  Probe
cggctgttaaccgaaaggttggtggttcgagcccacccagggacgcgctc

SEQ ID NO: 47314 - DNA, 50 bp, Artificial Sequence; identical to SEQ ID NO: 30481
  Probe

SEQ ID NO: 47315 - DNA, 50 bp, Artificial Sequence
  Probe
cggctgttaaccgaaaggttggtggttcgagcccacccagggacgcttgt

SEQ ID NO: 47316 - DNA, 43 bp, Artificial Sequence
  Probe
cggctgttaaccgaaaggttggtggttcgatcccacccaggga

SEQ ID NO: 47317 - DNA, 31 bp, Artificial Sequence; identical to SEQ ID NO: 13205
  Probe

SEQ ID NO: 47318 - DNA, 34 bp, Artificial Sequence; identical to SEQ ID NO: 19251
  Probe

SEQ ID NO: 47319 - DNA, 36 bp, Artificial Sequence; identical to SEQ ID NO: 5077
  Probe

SEQ ID NO: 47320 - DNA, 28 bp, Artificial Sequence
  Probe
cgggagaccggggttcgattccccgacg

SEQ ID NO: 47321 - DNA, 29 bp, Artificial Sequence
  Probe
cgggagaccggggttcgattccccgacgg

SEQ ID NO: 47322 - DNA, 34 bp, Artificial Sequence; identical to SEQ ID NO: 5079
  Probe

SEQ ID NO: 47323 - DNA, 35 bp, Artificial Sequence; identical to SEQ ID NO: 5081
  Probe

SEQ ID NO: 47324 - DNA, 36 bp, Artificial Sequence; identical to SEQ ID NO: 19262
  Probe

SEQ ID NO: 47325 - DNA, 34 bp, Artificial Sequence; identical to SEQ ID NO: 5082
  Probe

SEQ ID NO: 47326 - DNA, 35 bp, Artificial Sequence; identical to SEQ ID NO: 5083
  Probe

SEQ ID NO: 47327 - DNA, 36 bp, Artificial Sequence; identical to SEQ ID NO: 5084
  Probe

SEQ ID NO: 47328 - DNA, 36 bp, Artificial Sequence; identical to SEQ ID NO: 5085
  Probe

SEQ ID NO: 47329 - DNA, 33 bp, Artificial Sequence; identical to SEQ ID NO: 5086
  Probe

SEQ ID NO: 47330 - DNA, 36 bp, Artificial Sequence; identical to SEQ ID NO: 19286
  Probe

SEQ ID NO: 47331 - DNA, 36 bp, Artificial Sequence; identical to SEQ ID NO: 19288
  Probe

SEQ ID NO: 47332 - DNA, 33 bp, Artificial Sequence; identical to SEQ ID NO: 5087
  Probe

SEQ ID NO: 47333 - DNA, 24 bp, Artificial Sequence
  Probe
cgggatcgatgcccgcatcctcca

SEQ ID NO: 47334 - DNA, 26 bp, Artificial Sequence
  Probe
cgggctcacatcaccccataaacaaa

SEQ ID NO: 47335 - DNA, 27 bp, Artificial Sequence
  Probe
cgggctcacatcaccccataaacaaat

SEQ ID NO: 47336 - DNA, 16 bp, Artificial Sequence
  Probe
cggggcacaataattt

SEQ ID NO: 47337 - DNA, 33 bp, Artificial Sequence
  Probe
cgggggtatagctcagtggtagagcatttgact

SEQ ID NO: 47338 - DNA, 26 bp, Artificial Sequence
  Probe
cggggttcgattccccgacggggaga

SEQ ID NO: 47339 - DNA, 26 bp, Artificial Sequence
  Probe
cggggttcgattccccgacggggagg

SEQ ID NO: 47340 - DNA, 28 bp, Artificial Sequence
  Probe
cggggttcgattccccgacggggaggca

SEQ ID NO: 47341 - DNA, 27 bp, Artificial Sequence
  Probe
cgggttcaaatcccggacgagccccct

SEQ ID NO: 47342 - DNA, 27 bp, Artificial Sequence
  Probe
cgggttcaattcccggtcagggaacca

SEQ ID NO: 47343 - DNA, 27 bp, Artificial Sequence
  Probe
cgggttcgactcccggtatgggaacaa

SEQ ID NO: 47344 - DNA, 27 bp, Artificial Sequence
  Probe
cgggttcgactcccggtgtgggaacgc

SEQ ID NO: 47345 - DNA, 27 bp, Artificial Sequence
  Probe
cgggttcgatccccagcatctccagtg

SEQ ID NO: 47346 - DNA, 27 bp, Artificial Sequence
  Probe
cgggttcgatccccggcatctccattg

SEQ ID NO: 47347 - DNA, 27 bp, Artificial Sequence
  Probe
cgggttcgatccccgtacgggccacga

SEQ ID NO: 47348 - DNA, 27 bp, Artificial Sequence
  Probe
cgggttcgatccccgtacgggccactg

SEQ ID NO: 47349 - DNA, 27 bp, Artificial Sequence
  Probe
cgggttcgattcccggccaatgcacga

SEQ ID NO: 47350 - DNA, 27 bp, Artificial Sequence
  Probe
cgggttcgattcccggccaatgcagca

SEQ ID NO: 47351 - DNA, 27 bp, Artificial Sequence
  Probe
cgggttcgattcccggtcatggaacca

SEQ ID NO: 47352 - DNA, 20 bp, Artificial Sequence
  Probe
cggtaatcgcataaaactta

SEQ ID NO: 47353 - DNA, 25 bp, Artificial Sequence
  Probe
cggtaatcgcataaaacttaaaact

SEQ ID NO: 47354 - DNA, 30 bp, Artificial Sequence; identical to SEQ ID NO: 19323
  Probe

SEQ ID NO: 47355 - DNA, 33 bp, Artificial Sequence; identical to SEQ ID NO: 19324
  Probe

SEQ ID NO: 47356 - DNA, 38 bp, Artificial Sequence
  Probe
cggtaatcgcataaaacttaaaactttacagtcagagg

SEQ ID NO: 47357 - DNA, 41 bp, Artificial Sequence; identical to SEQ ID NO: 19327
  Probe

SEQ ID NO: 47358 - DNA, 42 bp, Artificial Sequence; identical to SEQ ID NO: 19328
  Probe

SEQ ID NO: 47359 - DNA, 17 bp, Artificial Sequence
  Probe
cggtagagcatcagact

SEQ ID NO: 47360 - DNA, 20 bp, Artificial Sequence
  Probe
cggtagagcatcagactttt

SEQ ID NO: 47361 - DNA, 49 bp, Artificial Sequence
  Probe
cggtagagcatgagactcttaatctcagggtcgtgggttcgagccccac

SEQ ID NO: 47362 - DNA, 16 bp, Artificial Sequence
  Probe
cggtagagcatgggac

SEQ ID NO: 47363 - DNA, 49 bp, Artificial Sequence
  Probe
cggtagagcatgggactcttaatcccagggtcgtgggttcgagccccac

SEQ ID NO: 47364 - DNA, 50 bp, Artificial Sequence
  Probe
cggttagctcagttggttagagcgtggtgctaataacgccaaggtcgcgg

SEQ ID NO: 47365 - DNA, 26 bp, Artificial Sequence
  Probe
cggttcaaatccgggtgccccctcac

SEQ ID NO: 47366 - DNA, 26 bp, Artificial Sequence
  Probe
cggttcaaatccgggtgccccctctg

SEQ ID NO: 47367 - DNA, 26 bp, Artificial Sequence
  Probe
cggttcgaaaccgggcggaaacacct

SEQ ID NO: 47368 - DNA, 23 bp, Artificial Sequence
  Probe
cggttcgaatccgagtcacggca

SEQ ID NO: 47369 - DNA, 26 bp, Artificial Sequence
  Probe
cggttcgaatccgagtcacggcaggt

SEQ ID NO: 47370 - DNA, 26 bp, Artificial Sequence
  Probe
cggttcgaatccgagtcacggcattg

SEQ ID NO: 47371 - DNA, 26 bp, Artificial Sequence
  Probe
cggttcgatcccgggcggaaacaggt

SEQ ID NO: 47372 - DNA, 27 bp, Artificial Sequence
  Probe
cgtagtgtagcggttatcacattcgcc

SEQ ID NO: 47373 - DNA, 23 bp, Artificial Sequence
  Probe
cgtagtgtagtggttatcacgtt

SEQ ID NO: 47374 - DNA, 26 bp, Artificial Sequence
  Probe
cgtagtgtagtggttatcacgttcgc

SEQ ID NO: 47375 - DNA, 27 bp, Artificial Sequence
  Probe
cgtagtgtagtggttatcacgttcgcc

SEQ ID NO: 47376 - DNA, 50 bp, Artificial Sequence; identical to SEQ ID NO: 5113
  Probe

SEQ ID NO: 47377 - DNA, 39 bp, Artificial Sequence; identical to SEQ ID NO: 19362
  Probe

SEQ ID NO: 47378 - DNA, 27 bp, Artificial Sequence
  Probe
cgtgagttcgagcctcacacggggcag

SEQ ID NO: 47379 - DNA, 28 bp, Artificial Sequence
  Probe
cgtgagttcgagcctcacacggggcagt

SEQ ID NO: 47380 - DNA, 27 bp, Artificial Sequence
  Probe
cgtgagttcgatcctcacacggggcac

SEQ ID NO: 47381 - DNA, 28 bp, Artificial Sequence
  Probe
cgtgagttcgatcctcacacggggcaca

SEQ ID NO: 47382 - DNA, 29 bp, Artificial Sequence
  Probe
cgtgagttcgatcctcacacggggcacaa

SEQ ID NO: 47383 - DNA, 34 bp, Artificial Sequence; identical to SEQ ID NO: 796
  Probe

SEQ ID NO: 47384 - DNA, 28 bp, Artificial Sequence
  Probe
cgtgctgggcccataacccagaggtcga

SEQ ID NO: 47385 - DNA, 50 bp, Artificial Sequence
  Probe
cgtgctgggcccataacccagaggtcgatggatcgaaaccatcctctgct

SEQ ID NO: 47386 - DNA, 18 bp, Artificial Sequence
  Probe
cgtggttgtagtccgtgc

SEQ ID NO: 47387 - DNA, 20 bp, Artificial Sequence
  Probe
cgtggttgtagtccgtgcga

SEQ ID NO: 47388 - DNA, 24 bp, Artificial Sequence
  Probe
cgtggttgtagtccgtgcgagaat

SEQ ID NO: 47389 - DNA, 25 bp, Artificial Sequence
  Probe
cgtggttgtagtccgtgcgagaata

SEQ ID NO: 47390 - DNA, 27 bp, Artificial Sequence
  Probe
cgtggttgtagtccgtgcgagaataat

SEQ ID NO: 47391 - DNA, 28 bp, Artificial Sequence
  Probe
cgtggttgtagtccgtgcgagaataatg

SEQ ID NO: 47392 - DNA, 50 bp, Artificial Sequence; identical to SEQ ID NO: 5125
  Probe

SEQ ID NO: 47393 - DNA, 29 bp, Artificial Sequence
  Probe
ctaaacctagccccaaacccactccacct

SEQ ID NO: 47394 - DNA, 24 bp, Artificial Sequence
  Probe
ctaaagacaggggttaggcctctt

SEQ ID NO: 47395 - DNA, 25 bp, Artificial Sequence
  Probe
ctaaagacaggggttaggcctcttt

SEQ ID NO: 47396 - DNA, 26 bp, Artificial Sequence
  Probe
ctaaagacaggggttaggcctctttt

SEQ ID NO: 47397 - DNA, 27 bp, Artificial Sequence
  Probe
ctaaagacaggggttaggcctcttttt

SEQ ID NO: 47398 - DNA, 28 bp, Artificial Sequence
  Probe
ctaaagacaggggttaggcctcttttta

SEQ ID NO: 47399 - DNA, 30 bp, Artificial Sequence; identical to SEQ ID NO: 5141
  Probe

SEQ ID NO: 47400 - DNA, 31 bp, Artificial Sequence; identical to SEQ ID NO: 5142
  Probe

SEQ ID NO: 47401 - DNA, 32 bp, Artificial Sequence; identical to SEQ ID NO: 5143
  Probe

SEQ ID NO: 47402 - DNA, 33 bp, Artificial Sequence; identical to SEQ ID NO: 5144
  Probe

SEQ ID NO: 47403 - DNA, 34 bp, Artificial Sequence; identical to SEQ ID NO: 5145
  Probe

SEQ ID NO: 47404 - DNA, 35 bp, Artificial Sequence; identical to SEQ ID NO: 5146
  Probe

SEQ ID NO: 47405 - DNA, 36 bp, Artificial Sequence; identical to SEQ ID NO: 5147
  Probe

SEQ ID NO: 47406 - DNA, 37 bp, Artificial Sequence; identical to SEQ ID NO: 5148
  Probe

SEQ ID NO: 47407 - DNA, 37 bp, Artificial Sequence; identical to SEQ ID NO: 19420
  Probe

SEQ ID NO: 47408 - DNA, 50 bp, Artificial Sequence; identical to SEQ ID NO: 804
  Probe

SEQ ID NO: 47409 - DNA, 22 bp, Artificial Sequence
  Probe
ctaaatcctatatatcttaatg

SEQ ID NO: 47410 - DNA, 22 bp, Artificial Sequence
  Probe
ctaacaacatggctttctcaac

SEQ ID NO: 47411 - DNA, 23 bp, Artificial Sequence
  Probe
ctaacaacatggctttctcaact

SEQ ID NO: 47412 - DNA, 23 bp, Artificial Sequence
  Probe
ctaacacgcgaaaggtccccggt

SEQ ID NO: 47413 - DNA, 21 bp, Artificial Sequence
  Probe
ctaactcatgcccccatgtct

SEQ ID NO: 47414 - DNA, 25 bp, Artificial Sequence
  Probe
ctaactcatgcccccatgtctaaca

SEQ ID NO: 47415 - DNA, 33 bp, Artificial Sequence; identical to SEQ ID NO: 5158
  Probe

SEQ ID NO: 47416 - DNA, 37 bp, Artificial Sequence; identical to SEQ ID NO: 5162
  Probe

SEQ ID NO: 47417 - DNA, 39 bp, Artificial Sequence; identical to SEQ ID NO: 5164
  Probe

SEQ ID NO: 47418 - DNA, 41 bp, Artificial Sequence; identical to SEQ ID NO: 5166
  Probe

SEQ ID NO: 47419 - DNA, 42 bp, Artificial Sequence; identical to SEQ ID NO: 5167
  Probe

SEQ ID NO: 47420 - DNA, 42 bp, Artificial Sequence; identical to SEQ ID NO: 13231
  Probe

SEQ ID NO: 47421 - DNA, 43 bp, Artificial Sequence
  Probe
ctaacttagcattaaccttttaagttaaagattaagagaacca

SEQ ID NO: 47422 - DNA, 50 bp, Artificial Sequence; identical to SEQ ID NO: 5168
  Probe

SEQ ID NO: 47423 - DNA, 42 bp, Artificial Sequence
  Probe
ctaagccagggattgtgggttcgagtcccacccggggtaaag

SEQ ID NO: 47424 - DNA, 42 bp, Artificial Sequence; identical to SEQ ID NO: 39561
  Probe

SEQ ID NO: 47425 - DNA, 42 bp, Artificial Sequence; identical to SEQ ID NO: 30715
  Probe

SEQ ID NO: 47426 - DNA, 18 bp, Artificial Sequence
  Probe
ctaagtgtttgtgggttt

SEQ ID NO: 47427 - DNA, 36 bp, Artificial Sequence; identical to SEQ ID NO: 19446
  Probe

SEQ ID NO: 47428 - DNA, 37 bp, Artificial Sequence; identical to SEQ ID NO: 5172
  Probe

SEQ ID NO: 47429 - DNA, 38 bp, Artificial Sequence; identical to SEQ ID NO: 5173
  Probe

SEQ ID NO: 47430 - DNA, 23 bp, Artificial Sequence
  Probe
ctaataacgccaaggtcgcgggt

SEQ ID NO: 47431 - DNA, 45 bp, Artificial Sequence; identical to SEQ ID NO: 39577
  Probe

SEQ ID NO: 47432 - DNA, 50 bp, Artificial Sequence; identical to SEQ ID NO: 39578
  Probe

SEQ ID NO: 47433 - DNA, 50 bp, Artificial Sequence; identical to SEQ ID NO: 39584
  Probe

SEQ ID NO: 47434 - DNA, 18 bp, Artificial Sequence
  Probe
ctaatggataaggcactg

SEQ ID NO: 47435 - DNA, 34 bp, Artificial Sequence; identical to SEQ ID NO: 19454
  Probe

SEQ ID NO: 47436 - DNA, 39 bp, Artificial Sequence; identical to SEQ ID NO: 5176
  Probe

SEQ ID NO: 47437 - DNA, 41 bp, Artificial Sequence; identical to SEQ ID NO: 5177
  Probe

SEQ ID NO: 47438 - DNA, 17 bp, Artificial Sequence
  Probe
ctactataaccacccta

SEQ ID NO: 47439 - DNA, 23 bp, Artificial Sequence
  Probe
ctagccccaaacccactccacct

SEQ ID NO: 47440 - DNA, 17 bp, Artificial Sequence
  Probe
ctagcctttctattagc

SEQ ID NO: 47441 - DNA, 27 bp, Artificial Sequence
  Probe
ctagctcagtcggtagagcatgggact

SEQ ID NO: 47442 - DNA, 20 bp, Artificial Sequence
  Probe
ctagtggttaggattcggcg

SEQ ID NO: 47443 - DNA, 20 bp, Artificial Sequence
  Probe
ctatagcaccccctctaccc

SEQ ID NO: 47444 - DNA, 23 bp, Artificial Sequence
  Probe
ctatccattggtcttaggcccca

SEQ ID NO: 47445 - DNA, 50 bp, Artificial Sequence; identical to SEQ ID NO: 5191
  Probe

SEQ ID NO: 47446 - DNA, 50 bp, Artificial Sequence; identical to SEQ ID NO: 5200
  Probe

SEQ ID NO: 47447 - DNA, 19 bp, Artificial Sequence
  Probe
ctatctccccttttatact

SEQ ID NO: 47448 - DNA, 20 bp, Artificial Sequence
  Probe
ctatctccccttttatacta

SEQ ID NO: 47449 - DNA, 18 bp, Artificial Sequence
  Probe
ctcaaagcaatacactga

SEQ ID NO: 47450 - DNA, 22 bp, Artificial Sequence
  Probe
ctcacaagaactgctaactcat

SEQ ID NO: 47451 - DNA, 23 bp, Artificial Sequence
  Probe
ctcacaagaactgctaactcatg

SEQ ID NO: 47452 - DNA, 49 bp, Artificial Sequence; identical to SEQ ID NO: 812
  Probe

SEQ ID NO: 47453 - DNA, 23 bp, Artificial Sequence
  Probe
ctcacacgcgaaaggtccccggt

SEQ ID NO: 47454 - DNA, 22 bp, Artificial Sequence
  Probe
ctcacacggggcacaataattt

SEQ ID NO: 47455 - DNA, 16 bp, Artificial Sequence
  Probe
ctcacatcaccccata

SEQ ID NO: 47456 - DNA, 17 bp, Artificial Sequence
  Probe
ctcacatcaccccataa

SEQ ID NO: 47457 - DNA, 20 bp, Artificial Sequence
  Probe
ctcacatcaccccataaaca

SEQ ID NO: 47458 - DNA, 22 bp, Artificial Sequence
  Probe
ctcacatcaccccataaacaaa

SEQ ID NO: 47459 - DNA, 23 bp, Artificial Sequence
  Probe
ctcacatcaccccataaacaaat

SEQ ID NO: 47460 - DNA, 42 bp, Artificial Sequence; identical to SEQ ID NO: 19506
  Probe

SEQ ID NO: 47461 - DNA, 42 bp, Artificial Sequence; identical to SEQ ID NO: 19507
  Probe

SEQ ID NO: 47462 - DNA, 42 bp, Artificial Sequence; identical to SEQ ID NO: 19508
  Probe

SEQ ID NO: 47463 - DNA, 42 bp, Artificial Sequence; identical to SEQ ID NO: 19509
  Probe

SEQ ID NO: 47464 - DNA, 21 bp, Artificial Sequence
  Probe
ctcacctggagcatgttttct

SEQ ID NO: 47465 - DNA, 16 bp, Artificial Sequence
  Probe
ctcagggatgggttcg

SEQ ID NO: 47466 - DNA, 17 bp, Artificial Sequence
  Probe
ctcagggatgggttcga

SEQ ID NO: 47467 - DNA, 23 bp, Artificial Sequence
  Probe
ctcagggatgggttcgattctca

SEQ ID NO: 47468 - DNA, 28 bp, Artificial Sequence
  Probe
ctcagggatgggttcgattctcatagtc

SEQ ID NO: 47469 - DNA, 29 bp, Artificial Sequence
  Probe
ctcagggatgggttcgattctcatagtcc

SEQ ID NO: 47470 - DNA, 32 bp, Artificial Sequence; identical to SEQ ID NO: 816
  Probe

SEQ ID NO: 47471 - DNA, 33 bp, Artificial Sequence; identical to SEQ ID NO: 5218
  Probe

SEQ ID NO: 47472 - DNA, 35 bp, Artificial Sequence; identical to SEQ ID NO: 5220
  Probe

SEQ ID NO: 47473 - DNA, 18 bp, Artificial Sequence
  Probe
ctcagtaagttgcaatac

SEQ ID NO: 47474 - DNA, 24 bp, Artificial Sequence
  Probe
ctcagtaagttgcaatacttaatt

SEQ ID NO: 47475 - DNA, 26 bp, Artificial Sequence
  Probe
ctcagtaagttgcaatacttaatttc

SEQ ID NO: 47476 - DNA, 27 bp, Artificial Sequence
  Probe
ctcagtaagttgcaatacttaatttct

SEQ ID NO: 47477 - DNA, 28 bp, Artificial Sequence
  Probe
ctcagtaagttgcaatacttaatttctg

SEQ ID NO: 47478 - DNA, 45 bp, Artificial Sequence; identical to SEQ ID NO: 39634
  Probe

SEQ ID NO: 47479 - DNA, 48 bp, Artificial Sequence
  Probe
ctcataatctgaaggtcctgagttcgaacctcagagggggcagctgcc

SEQ ID NO: 47480 - DNA, 45 bp, Artificial Sequence; identical to SEQ ID NO: 39638
  Probe

SEQ ID NO: 47481 - DNA, 21 bp, Artificial Sequence
  Probe
ctcatgcccccatgtctaaca

SEQ ID NO: 47482 - DNA, 29 bp, Artificial Sequence
  Probe
ctcatgcccccatgtctaacaacatggct

SEQ ID NO: 47483 - DNA, 30 bp, Artificial Sequence; identical to SEQ ID NO: 5236
  Probe

SEQ ID NO: 47484 - DNA, 31 bp, Artificial Sequence; identical to SEQ ID NO: 5237
  Probe

SEQ ID NO: 47485 - DNA, 32 bp, Artificial Sequence; identical to SEQ ID NO: 5238
  Probe

SEQ ID NO: 47486 - DNA, 33 bp, Artificial Sequence; identical to SEQ ID NO: 5239
  Probe

SEQ ID NO: 47487 - DNA, 35 bp, Artificial Sequence; identical to SEQ ID NO: 5241
  Probe

SEQ ID NO: 47488 - DNA, 36 bp, Artificial Sequence; identical to SEQ ID NO: 5242
  Probe

SEQ ID NO: 47489 - DNA, 37 bp, Artificial Sequence; identical to SEQ ID NO: 5243
  Probe

SEQ ID NO: 47490 - DNA, 38 bp, Artificial Sequence; identical to SEQ ID NO: 5244
  Probe

SEQ ID NO: 47491 - DNA, 34 bp, Artificial Sequence; identical to SEQ ID NO: 5247
  Probe

SEQ ID NO: 47492 - DNA, 24 bp, Artificial Sequence
  Probe
ctcatttacataaatattatacta

SEQ ID NO: 47493 - DNA, 25 bp, Artificial Sequence
  Probe
ctccagtcatttcgatggcgtgggt

SEQ ID NO: 47494 - DNA, 50 bp, Artificial Sequence; identical to SEQ ID NO: 5248
  Probe

SEQ ID NO: 47495 - DNA, 44 bp, Artificial Sequence
  Probe
ctccagtctcttcgggggcgtgggttcgaatcccaccgctgcca

SEQ ID NO: 47496 - DNA, 50 bp, Artificial Sequence
  Probe
ctccagtctcttcgggggcgtgggttcgaatcccaccgctgccagggttg

SEQ ID NO: 47497 - DNA, 50 bp, Artificial Sequence; identical to SEQ ID NO: 5249
  Probe

SEQ ID NO: 47498 - DNA, 16 bp, Artificial Sequence
  Probe
ctcccgccttttttcc

SEQ ID NO: 47499 - DNA, 17 bp, Artificial Sequence
  Probe
ctcccgccttttttccc

SEQ ID NO: 47500 - DNA, 18 bp, Artificial Sequence
  Probe
ctcccgccttttttcccg

SEQ ID NO: 47501 - DNA, 19 bp, Artificial Sequence
  Probe
ctcccgccttttttcccgg

SEQ ID NO: 47502 - DNA, 20 bp, Artificial Sequence
  Probe
ctcccgccttttttcccggc

SEQ ID NO: 47503 - DNA, 21 bp, Artificial Sequence
  Probe
ctcccgccttttttcccggcg

SEQ ID NO: 47504 - DNA, 23 bp, Artificial Sequence
  Probe
ctcccgccttttttcccggcggc

SEQ ID NO: 47505 - DNA, 24 bp, Artificial Sequence
  Probe
ctcccgccttttttcccggcggcg

SEQ ID NO: 47506 - DNA, 25 bp, Artificial Sequence
  Probe
ctcccgccttttttcccggcggcgg

SEQ ID NO: 47507 - DNA, 26 bp, Artificial Sequence
  Probe
ctcccgccttttttcccggcggcggg

SEQ ID NO: 47508 - DNA, 27 bp, Artificial Sequence
  Probe
ctcccgccttttttcccggcggcggga

SEQ ID NO: 47509 - DNA, 28 bp, Artificial Sequence
  Probe
ctcccgccttttttcccggcggcgggag

SEQ ID NO: 47510 - DNA, 29 bp, Artificial Sequence
  Probe
ctcccgccttttttcccggcggcgggaga

SEQ ID NO: 47511 - DNA, 30 bp, Artificial Sequence; identical to SEQ ID NO: 5265
  Probe

SEQ ID NO: 47512 - DNA, 18 bp, Artificial Sequence
  Probe
ctcccggtatgggaacaa

SEQ ID NO: 47513 - DNA, 17 bp, Artificial Sequence
  Probe
ctcccggtgtgggaacg

SEQ ID NO: 47514 - DNA, 18 bp, Artificial Sequence
  Probe
ctcccggtgtgggaacgc

SEQ ID NO: 47515 - DNA, 32 bp, Artificial Sequence; identical to SEQ ID NO: 39662
  Probe

SEQ ID NO: 47516 - DNA, 34 bp, Artificial Sequence; identical to SEQ ID NO: 5267
  Probe

SEQ ID NO: 47517 - DNA, 21 bp, Artificial Sequence
  Probe
ctcctcaaagcaatacactga

SEQ ID NO: 47518 - DNA, 33 bp, Artificial Sequence
  Probe
ctcctcgttagtatagtggtgagtatccccgcc

SEQ ID NO: 47519 - DNA, 37 bp, Artificial Sequence; identical to SEQ ID NO: 5270
  Probe

SEQ ID NO: 47520 - DNA, 33 bp, Artificial Sequence; identical to SEQ ID NO: 819
  Probe

SEQ ID NO: 47521 - DNA, 44 bp, Artificial Sequence; identical to SEQ ID NO: 19591
  Probe

SEQ ID NO: 47522 - DNA, 50 bp, Artificial Sequence; identical to SEQ ID NO: 5278
  Probe

SEQ ID NO: 47523 - DNA, 41 bp, Artificial Sequence; identical to SEQ ID NO: 19600
  Probe

SEQ ID NO: 47524 - DNA, 42 bp, Artificial Sequence; identical to SEQ ID NO: 5280
  Probe

SEQ ID NO: 47525 - DNA, 43 bp, Artificial Sequence; identical to SEQ ID NO: 5281
  Probe

SEQ ID NO: 47526 - DNA, 44 bp, Artificial Sequence; identical to SEQ ID NO: 5282
  Probe

SEQ ID NO: 47527 - DNA, 37 bp, Artificial Sequence; identical to SEQ ID NO: 5284
  Probe

SEQ ID NO: 47528 - DNA, 34 bp, Artificial Sequence
  Probe
ctgaaggtcgtgagttcgagcctcacacggggca

SEQ ID NO: 47529 - DNA, 31 bp, Artificial Sequence; identical to SEQ ID NO: 19609
  Probe

SEQ ID NO: 47530 - DNA, 33 bp, Artificial Sequence
  Probe
ctgaaggtcgtgagttcgatcctcacacggggc

SEQ ID NO: 47531 - DNA, 35 bp, Artificial Sequence
  Probe
ctgaaggtcgtgagttcgatcctcacacggggcac

SEQ ID NO: 47532 - DNA, 37 bp, Artificial Sequence; identical to SEQ ID NO: 5287
  Probe

SEQ ID NO: 47533 - DNA, 22 bp, Artificial Sequence
  Probe
ctgaatccagcgatccgagttc

SEQ ID NO: 47534 - DNA, 39 bp, Artificial Sequence; identical to SEQ ID NO: 833
  Probe

SEQ ID NO: 47535 - DNA, 42 bp, Artificial Sequence; identical to SEQ ID NO: 5291
  Probe

SEQ ID NO: 47536 - DNA, 18 bp, Artificial Sequence
  Probe
ctgacaacagaggcttac

SEQ ID NO: 47537 - DNA, 19 bp, Artificial Sequence
  Probe
ctgacaacagaggcttacg

SEQ ID NO: 47538 - DNA, 23 bp, Artificial Sequence
  Probe
ctgacaacagaggcttacgaccc

SEQ ID NO: 47539 - DNA, 34 bp, Artificial Sequence; identical to SEQ ID NO: 5298
  Probe

SEQ ID NO: 47540 - DNA, 35 bp, Artificial Sequence; identical to SEQ ID NO: 5299
  Probe

SEQ ID NO: 47541 - DNA, 36 bp, Artificial Sequence; identical to SEQ ID NO: 5300
  Probe

SEQ ID NO: 47542 - DNA, 34 bp, Artificial Sequence; identical to SEQ ID NO: 19619
  Probe

SEQ ID NO: 47543 - DNA, 35 bp, Artificial Sequence
  Probe
ctgagggtccagggttcaagtccctgttcgggcgg

SEQ ID NO: 47544 - DNA, 35 bp, Artificial Sequence
  Probe
ctgagggtccagggttcaagtccctgttcgggcgt

SEQ ID NO: 47545 - DNA, 50 bp, Artificial Sequence; identical to SEQ ID NO: 5306
  Probe

SEQ ID NO: 47546 - DNA, 31 bp, Artificial Sequence; identical to SEQ ID NO: 19621
  Probe

SEQ ID NO: 47547 - DNA, 32 bp, Artificial Sequence; identical to SEQ ID NO: 19622
  Probe

SEQ ID NO: 47548 - DNA, 33 bp, Artificial Sequence; identical to SEQ ID NO: 5307
  Probe

SEQ ID NO: 47549 - DNA, 22 bp, Artificial Sequence
  Probe
ctgccacgcgggaggcccgggt

SEQ ID NO: 47550 - DNA, 23 bp, Artificial Sequence
  Probe
ctgcgtgttcgaatcacgtcggg

SEQ ID NO: 47551 - DNA, 27 bp, Artificial Sequence
  Probe
ctgcgtgttcgaatcacgtcggggtca

SEQ ID NO: 47552 - DNA, 28 bp, Artificial Sequence
  Probe
ctgcgtgttcgaatcacgtcggggtcaa

SEQ ID NO: 47553 - DNA, 30 bp, Artificial Sequence; identical to SEQ ID NO: 5308
  Probe

SEQ ID NO: 47554 - DNA, 23 bp, Artificial Sequence
  Probe
ctgctaactcatgcccccatgtc

SEQ ID NO: 47555 - DNA, 24 bp, Artificial Sequence
  Probe
ctgctaactcatgcccccatgtct

SEQ ID NO: 47556 - DNA, 28 bp, Artificial Sequence
  Probe
ctgctaactcatgcccccatgtctaaca

SEQ ID NO: 47557 - DNA, 31 bp, Artificial Sequence; identical to SEQ ID NO: 5313
  Probe

SEQ ID NO: 47558 - DNA, 36 bp, Artificial Sequence; identical to SEQ ID NO: 5314
  Probe

SEQ ID NO: 47559 - DNA, 39 bp, Artificial Sequence; identical to SEQ ID NO: 5317
  Probe

SEQ ID NO: 47560 - DNA, 40 bp, Artificial Sequence; identical to SEQ ID NO: 5318
  Probe

SEQ ID NO: 47561 - DNA, 42 bp, Artificial Sequence; identical to SEQ ID NO: 5320
  Probe

SEQ ID NO: 47562 - DNA, 44 bp, Artificial Sequence; identical to SEQ ID NO: 5322
  Probe

SEQ ID NO: 47563 - DNA, 45 bp, Artificial Sequence; identical to SEQ ID NO: 5323
  Probe

SEQ ID NO: 47564 - DNA, 50 bp, Artificial Sequence
  Probe
ctgctttacacgcagaaggtcctgggttcgagccccagtggaaccacggc

SEQ ID NO: 47565 - DNA, 24 bp, Artificial Sequence
  Probe
ctggaaagtgcacttggacgaacc

SEQ ID NO: 47566 - DNA, 33 bp, Artificial Sequence
  Probe
ctggggattgtgggttcgagtcccatctgggtc

SEQ ID NO: 47567 - DNA, 32 bp, Artificial Sequence; identical to SEQ ID NO: 841
  Probe

SEQ ID NO: 47568 - DNA, 33 bp, Artificial Sequence; identical to SEQ ID NO: 842
  Probe

SEQ ID NO: 47569 - DNA, 48 bp, Artificial Sequence
  Probe
ctggtgtagtggtatcatgcaagattcccattcttgcgacccgggttc

SEQ ID NO: 47570 - DNA, 26 bp, Artificial Sequence
  Probe
ctggttcgaatccggctcgaaggacg

SEQ ID NO: 47571 - DNA, 24 bp, Artificial Sequence
  Probe
ctggttcgatcccgggtttcggca

SEQ ID NO: 47572 - DNA, 24 bp, Artificial Sequence
  Probe
ctggttcgattccggctcgaagga

SEQ ID NO: 47573 - DNA, 26 bp, Artificial Sequence
  Probe
ctggttcgattccggctcgaaggact

SEQ ID NO: 47574 - DNA, 50 bp, Artificial Sequence; identical to SEQ ID NO: 844
  Probe

SEQ ID NO: 47575 - DNA, 17 bp, Artificial Sequence
  Probe
ctgtcacgcgggagacc

SEQ ID NO: 47576 - DNA, 20 bp, Artificial Sequence
  Probe
ctgtcacgcgggagaccggg

SEQ ID NO: 47577 - DNA, 24 bp, Artificial Sequence
  Probe
ctgtcacgcgggagaccggggttc

SEQ ID NO: 47578 - DNA, 39 bp, Artificial Sequence; identical to SEQ ID NO: 846
  Probe

SEQ ID NO: 47579 - DNA, 40 bp, Artificial Sequence
  Probe
ctgtcacgcgggagaccggggttcaattccccgacgggga

SEQ ID NO: 47580 - DNA, 41 bp, Artificial Sequence; identical to SEQ ID NO: 36674
  Probe

SEQ ID NO: 47581 - DNA, 44 bp, Artificial Sequence; identical to SEQ ID NO: 5338
  Probe

SEQ ID NO: 47582 - DNA, 37 bp, Artificial Sequence; identical to SEQ ID NO: 13293
  Probe

SEQ ID NO: 47583 - DNA, 38 bp, Artificial Sequence; identical to SEQ ID NO: 13294
  Probe

SEQ ID NO: 47584 - DNA, 42 bp, Artificial Sequence; identical to SEQ ID NO: 19677
  Probe

SEQ ID NO: 47585 - DNA, 50 bp, Artificial Sequence; identical to SEQ ID NO: 39803
  Probe

SEQ ID NO: 47586 - DNA, 44 bp, Artificial Sequence; identical to SEQ ID NO: 5339
  Probe

SEQ ID NO: 47587 - DNA, 42 bp, Artificial Sequence; identical to SEQ ID NO: 19681
  Probe

SEQ ID NO: 47588 - DNA, 44 bp, Artificial Sequence; identical to SEQ ID NO: 5340
  Probe

SEQ ID NO: 47589 - DNA, 50 bp, Artificial Sequence; identical to SEQ ID NO: 5341
  Probe

SEQ ID NO: 47590 - DNA, 50 bp, Artificial Sequence; identical to SEQ ID NO: 39824
  Probe

SEQ ID NO: 47591 - DNA, 22 bp, Artificial Sequence
  Probe
ctgtgctccggagttacctcgt

SEQ ID NO: 47592 - DNA, 23 bp, Artificial Sequence
  Probe
ctgtgctccggagttacctcgtt

SEQ ID NO: 47593 - DNA, 24 bp, Artificial Sequence
  Probe
ctgtgctccggagttacctcgttt

SEQ ID NO: 47594 - DNA, 25 bp, Artificial Sequence
  Probe
ctgtgctccggagttacctcgtttt

SEQ ID NO: 47595 - DNA, 40 bp, Artificial Sequence
  Probe
ctgttaaccgaaaggttggtggttcgagcccacccaggga

SEQ ID NO: 47596 - DNA, 42 bp, Artificial Sequence; identical to SEQ ID NO: 36692
  Probe

SEQ ID NO: 47597 - DNA, 25 bp, Artificial Sequence
  Probe
ctgttaactaagtgtttgtgggttt

SEQ ID NO: 47598 - DNA, 29 bp, Artificial Sequence
  Probe
ctgttaactaagtgtttgtgggtttaagt

SEQ ID NO: 47599 - DNA, 43 bp, Artificial Sequence; identical to SEQ ID NO: 19694
  Probe

SEQ ID NO: 47600 - DNA, 44 bp, Artificial Sequence; identical to SEQ ID NO: 5345
  Probe

SEQ ID NO: 47601 - DNA, 45 bp, Artificial Sequence; identical to SEQ ID NO: 5346
  Probe

SEQ ID NO: 47602 - DNA, 38 bp, Artificial Sequence; identical to SEQ ID NO: 5349
  Probe

SEQ ID NO: 47603 - DNA, 39 bp, Artificial Sequence; identical to SEQ ID NO: 5350
  Probe

SEQ ID NO: 47604 - DNA, 40 bp, Artificial Sequence; identical to SEQ ID NO: 5351
  Probe

SEQ ID NO: 47605 - DNA, 41 bp, Artificial Sequence; identical to SEQ ID NO: 5352
  Probe

SEQ ID NO: 47606 - DNA, 42 bp, Artificial Sequence; identical to SEQ ID NO: 5353
  Probe

SEQ ID NO: 47607 - DNA, 45 bp, Artificial Sequence; identical to SEQ ID NO: 5355
  Probe

SEQ ID NO: 47608 - DNA, 20 bp, Artificial Sequence
  Probe
cttaaacccccttatttcta

SEQ ID NO: 47609 - DNA, 22 bp, Artificial Sequence
  Probe
cttaaacccccttatttctagg

SEQ ID NO: 47610 - DNA, 16 bp, Artificial Sequence
  Probe
cttaacacaaagcacc

SEQ ID NO: 47611 - DNA, 17 bp, Artificial Sequence
  Probe
cttaacacaaagcaccc

SEQ ID NO: 47612 - DNA, 18 bp, Artificial Sequence
  Probe
cttaacacaaagcaccca

SEQ ID NO: 47613 - DNA, 19 bp, Artificial Sequence
  Probe
cttaacacaaagcacccaa

SEQ ID NO: 47614 - DNA, 21 bp, Artificial Sequence
  Probe
cttaacacaaagcacccaact

SEQ ID NO: 47615 - DNA, 27 bp, Artificial Sequence
  Probe
cttaacacaaagcacccaacttacact

SEQ ID NO: 47616 - DNA, 35 bp, Artificial Sequence
  Probe
cttaacacaaagcacccaacttacacttaggagat

SEQ ID NO: 47617 - DNA, 50 bp, Artificial Sequence; identical to SEQ ID NO: 849
  Probe

SEQ ID NO: 47618 - DNA, 21 bp, Artificial Sequence
  Probe
cttaacttgaccgctctgagc

SEQ ID NO: 47619 - DNA, 22 bp, Artificial Sequence
  Probe
cttaacttgaccgctctgagct

SEQ ID NO: 47620 - DNA, 20 bp, Artificial Sequence
  Probe
cttacacttaggagatttca

SEQ ID NO: 47621 - DNA, 34 bp, Artificial Sequence; identical to SEQ ID NO: 5367
  Probe

SEQ ID NO: 47622 - DNA, 35 bp, Artificial Sequence
  Probe
cttacacttaggagatttcaacttaacttgaccgc

SEQ ID NO: 47623 - DNA, 36 bp, Artificial Sequence; identical to SEQ ID NO: 5368
  Probe

SEQ ID NO: 47624 - DNA, 38 bp, Artificial Sequence; identical to SEQ ID NO: 19716
  Probe

SEQ ID NO: 47625 - DNA, 41 bp, Artificial Sequence; identical to SEQ ID NO: 5370
  Probe

SEQ ID NO: 47626 - DNA, 42 bp, Artificial Sequence; identical to SEQ ID NO: 5371
  Probe

SEQ ID NO: 47627 - DNA, 43 bp, Artificial Sequence; identical to SEQ ID NO: 5372
  Probe

SEQ ID NO: 47628 - DNA, 17 bp, Artificial Sequence
  Probe
cttacctcctcaaagca

SEQ ID NO: 47629 - DNA, 25 bp, Artificial Sequence
  Probe
cttacctcctcaaagcaatacactg

SEQ ID NO: 47630 - DNA, 29 bp, Artificial Sequence
  Probe
cttagcattaaccttttaagttaaagatt

SEQ ID NO: 47631 - DNA, 36 bp, Artificial Sequence; identical to SEQ ID NO: 5376
  Probe

SEQ ID NO: 47632 - DNA, 38 bp, Artificial Sequence; identical to SEQ ID NO: 19725
  Probe

SEQ ID NO: 47633 - DNA, 39 bp, Artificial Sequence; identical to SEQ ID NO: 5377
  Probe

SEQ ID NO: 47634 - DNA, 44 bp, Artificial Sequence
  Probe
cttagcattaaccttttaagttaaagattaagagaaccaacacc

SEQ ID NO: 47635 - DNA, 50 bp, Artificial Sequence; identical to SEQ ID NO: 850
  Probe

SEQ ID NO: 47636 - DNA, 50 bp, Artificial Sequence; identical to SEQ ID NO: 5381
  Probe

SEQ ID NO: 47637 - DNA, 24 bp, Artificial Sequence
  Probe
cttaggagatttcaacttaacttg

SEQ ID NO: 47638 - DNA, 25 bp, Artificial Sequence
  Probe
cttaggagatttcaacttaacttga

SEQ ID NO: 47639 - DNA, 26 bp, Artificial Sequence
  Probe
cttaggagatttcaacttaacttgac

SEQ ID NO: 47640 - DNA, 27 bp, Artificial Sequence
  Probe
cttaggagatttcaacttaacttgacc

SEQ ID NO: 47641 - DNA, 28 bp, Artificial Sequence
  Probe
cttaggagatttcaacttaacttgaccg

SEQ ID NO: 47642 - DNA, 29 bp, Artificial Sequence
  Probe
cttaggagatttcaacttaacttgaccgc

SEQ ID NO: 47643 - DNA, 30 bp, Artificial Sequence; identical to SEQ ID NO: 5384
  Probe

SEQ ID NO: 47644 - DNA, 31 bp, Artificial Sequence; identical to SEQ ID NO: 5385
  Probe

SEQ ID NO: 47645 - DNA, 32 bp, Artificial Sequence; identical to SEQ ID NO: 5386
  Probe

SEQ ID NO: 47646 - DNA, 34 bp, Artificial Sequence; identical to SEQ ID NO: 5388
  Probe

SEQ ID NO: 47647 - DNA, 35 bp, Artificial Sequence; identical to SEQ ID NO: 5389
  Probe

SEQ ID NO: 47648 - DNA, 36 bp, Artificial Sequence; identical to SEQ ID NO: 5390
  Probe

SEQ ID NO: 47649 - DNA, 37 bp, Artificial Sequence; identical to SEQ ID NO: 5391
  Probe

SEQ ID NO: 47650 - DNA, 35 bp, Artificial Sequence
  Probe
cttaggccccaaaaattttggtgcaactccaaata

SEQ ID NO: 47651 - DNA, 44 bp, Artificial Sequence
  Probe
cttaggccccaaaaattttggtgcaactccaaataaaagtaata

SEQ ID NO: 47652 - DNA, 33 bp, Artificial Sequence
  Probe
cttaggtcgctggttcgaatccggctcgaagga

SEQ ID NO: 47653 - DNA, 33 bp, Artificial Sequence; identical to SEQ ID NO: 19740
  Probe

SEQ ID NO: 47654 - DNA, 41 bp, Artificial Sequence; identical to SEQ ID NO: 19749
  Probe

SEQ ID NO: 47655 - DNA, 42 bp, Artificial Sequence; identical to SEQ ID NO: 19750
  Probe

SEQ ID NO: 47656 - DNA, 43 bp, Artificial Sequence; identical to SEQ ID NO: 5395
  Probe

SEQ ID NO: 47657 - DNA, 50 bp, Artificial Sequence
  Probe
cttccaattaactagttttgacaacattcaaaaaagagtaataaacttcg

SEQ ID NO: 47658 - DNA, 33 bp, Artificial Sequence; identical to SEQ ID NO: 19755
  Probe

SEQ ID NO: 47659 - DNA, 40 bp, Artificial Sequence; identical to SEQ ID NO: 5396
  Probe

SEQ ID NO: 47660 - DNA, 46 bp, Artificial Sequence; identical to SEQ ID NO: 5397
  Probe

SEQ ID NO: 47661 - DNA, 17 bp, Artificial Sequence
  Probe
ctttacagtcagaggtt

SEQ ID NO: 47662 - DNA, 18 bp, Artificial Sequence
  Probe
ctttacagtcagaggttc

SEQ ID NO: 47663 - DNA, 29 bp, Artificial Sequence
  Probe
ctttacagtcagaggttcaattcctcttc

SEQ ID NO: 47664 - DNA, 30 bp, Artificial Sequence; identical to SEQ ID NO: 19761
  Probe

SEQ ID NO: 47665 - DNA, 37 bp, Artificial Sequence; identical to SEQ ID NO: 5399
  Probe

SEQ ID NO: 47666 - DNA, 38 bp, Artificial Sequence; identical to SEQ ID NO: 5400
  Probe

SEQ ID NO: 47667 - DNA, 33 bp, Artificial Sequence; identical to SEQ ID NO: 31135
  Probe

SEQ ID NO: 47668 - DNA, 46 bp, Artificial Sequence; identical to SEQ ID NO: 5403
  Probe

SEQ ID NO: 47669 - DNA, 50 bp, Artificial Sequence; identical to SEQ ID NO: 5404
  Probe

SEQ ID NO: 47670 - DNA, 31 bp, Artificial Sequence; identical to SEQ ID NO: 5405
  Probe

SEQ ID NO: 47671 - DNA, 32 bp, Artificial Sequence; identical to SEQ ID NO: 19773
  Probe

SEQ ID NO: 47672 - DNA, 40 bp, Artificial Sequence
  Probe
ctttgggtgctaatggtggagttaaagactttttctctga

SEQ ID NO: 47673 - DNA, 43 bp, Artificial Sequence; identical to SEQ ID NO: 5406
  Probe

SEQ ID NO: 47674 - DNA, 45 bp, Artificial Sequence
  Probe
ctttgtcaaagttaaattataggctaaatcctatatatcttaatg

SEQ ID NO: 47675 - DNA, 26 bp, Artificial Sequence
  Probe
cttttaagttaaagattaagagaacc

SEQ ID NO: 47676 - DNA, 27 bp, Artificial Sequence
  Probe
cttttaagttaaagattaagagaacca

SEQ ID NO: 47677 - DNA, 32 bp, Artificial Sequence; identical to SEQ ID NO: 31154
  Probe

SEQ ID NO: 47678 - DNA, 44 bp, Artificial Sequence
  Probe
cttttaagttaaagattaagagaaccaacacctctttacagtga

SEQ ID NO: 47679 - DNA, 46 bp, Artificial Sequence; identical to SEQ ID NO: 31159
  Probe

SEQ ID NO: 47680 - DNA, 48 bp, Artificial Sequence
  Probe
cttttaagttaaagattaagagaaccaacacctctttacagtgaaatg

SEQ ID NO: 47681 - DNA, 49 bp, Artificial Sequence; identical to SEQ ID NO: 5407
  Probe

SEQ ID NO: 47682 - DNA, 50 bp, Artificial Sequence; identical to SEQ ID NO: 5408
  Probe

SEQ ID NO: 47683 - DNA, 23 bp, Artificial Sequence
  Probe
cttttttcccggcggcgggagaa

SEQ ID NO: 47684 - DNA, 25 bp, Artificial Sequence
  Probe
cttttttcccggcggcgggagaagt

SEQ ID NO: 47685 - DNA, 17 bp, Artificial Sequence
  Probe
gaaaaagtcatggaggc

SEQ ID NO: 47686 - DNA, 21 bp, Artificial Sequence
  Probe
gaaaaagtcatggaggccatg

SEQ ID NO: 47687 - DNA, 24 bp, Artificial Sequence
  Probe
gaaaaagtcatggaggccatgggg

SEQ ID NO: 47688 - DNA, 26 bp, Artificial Sequence
  Probe
gaaaaagtcatggaggccatggggtt

SEQ ID NO: 47689 - DNA, 28 bp, Artificial Sequence
  Probe
gaaaaagtcatggaggccatggggttgg

SEQ ID NO: 47690 - DNA, 29 bp, Artificial Sequence
  Probe
gaaaaagtcatggaggccatggggttggc

SEQ ID NO: 47691 - DNA, 31 bp, Artificial Sequence; identical to SEQ ID NO: 5416
  Probe

SEQ ID NO: 47692 - DNA, 50 bp, Artificial Sequence; identical to SEQ ID NO: 5419
  Probe

SEQ ID NO: 47693 - DNA, 24 bp, Artificial Sequence
  Probe
gaaaacctttttccaaggacaaat

SEQ ID NO: 47694 - DNA, 24 bp, Artificial Sequence
  Probe
gaaaatgttggttatacccttccc

SEQ ID NO: 47695 - DNA, 25 bp, Artificial Sequence
  Probe
gaaaatgttggttatacccttcccg

SEQ ID NO: 47696 - DNA, 28 bp, Artificial Sequence
  Probe
gaaaatgttggttatacccttcccgtac

SEQ ID NO: 47697 - DNA, 29 bp, Artificial Sequence
  Probe
gaaaatgttggttatacccttcccgtact

SEQ ID NO: 47698 - DNA, 30 bp, Artificial Sequence; identical to SEQ ID NO: 13310
  Probe

SEQ ID NO: 47699 - DNA, 31 bp, Artificial Sequence; identical to SEQ ID NO: 19801
  Probe

SEQ ID NO: 47700 - DNA, 18 bp, Artificial Sequence
  Probe
gaaaatgtttagacgggc

SEQ ID NO: 47701 - DNA, 21 bp, Artificial Sequence
  Probe
gaaaatgtttagacgggctca

SEQ ID NO: 47702 - DNA, 23 bp, Artificial Sequence
  Probe
gaaaatgtttagacgggctcaca

SEQ ID NO: 47703 - DNA, 30 bp, Artificial Sequence; identical to SEQ ID NO: 861
  Probe

SEQ ID NO: 47704 - DNA, 33 bp, Artificial Sequence; identical to SEQ ID NO: 864
  Probe

SEQ ID NO: 47705 - DNA, 34 bp, Artificial Sequence; identical to SEQ ID NO: 31189
  Probe

SEQ ID NO: 47706 - DNA, 37 bp, Artificial Sequence
  Probe
gaaaatgtttagacgggctcacatcaccccataaaca

SEQ ID NO: 47707 - DNA, 38 bp, Artificial Sequence; identical to SEQ ID NO: 19810
  Probe

SEQ ID NO: 47708 - DNA, 39 bp, Artificial Sequence; identical to SEQ ID NO: 5426
  Probe

SEQ ID NO: 47709 - DNA, 40 bp, Artificial Sequence; identical to SEQ ID NO: 5427
  Probe

SEQ ID NO: 47710 - DNA, 41 bp, Artificial Sequence; identical to SEQ ID NO: 5428
  Probe

SEQ ID NO: 47711 - DNA, 42 bp, Artificial Sequence; identical to SEQ ID NO: 5429
  Probe

SEQ ID NO: 47712 - DNA, 46 bp, Artificial Sequence
  Probe
gaaaatgtttagacgggctcacatcaccccataaacaaataggttt

SEQ ID NO: 47713 - DNA, 38 bp, Artificial Sequence; identical to SEQ ID NO: 19816
  Probe

SEQ ID NO: 47714 - DNA, 20 bp, Artificial Sequence
  Probe
gaaaccatcctctgctaggt

SEQ ID NO: 47715 - DNA, 17 bp, Artificial Sequence
  Probe
gaaaccgggcggaaaca

SEQ ID NO: 47716 - DNA, 20 bp, Artificial Sequence
  Probe
gaaaccgggcggaaacacct

SEQ ID NO: 47717 - DNA, 18 bp, Artificial Sequence
  Probe
gaaagctcacaagaactg

SEQ ID NO: 47718 - DNA, 20 bp, Artificial Sequence
  Probe
gaaagctcacaagaactgct

SEQ ID NO: 47719 - DNA, 25 bp, Artificial Sequence
  Probe
gaaagctcacaagaactgctaactc

SEQ ID NO: 47720 - DNA, 26 bp, Artificial Sequence
  Probe
gaaagctcacaagaactgctaactca

SEQ ID NO: 47721 - DNA, 28 bp, Artificial Sequence
  Probe
gaaagctcacaagaactgctaactcatg

SEQ ID NO: 47722 - DNA, 39 bp, Artificial Sequence
  Probe
gaaagctcacaagaactgctaactcatgcccccatgtct

SEQ ID NO: 47723 - DNA, 50 bp, Artificial Sequence; identical to SEQ ID NO: 879
  Probe

SEQ ID NO: 47724 - DNA, 33 bp, Artificial Sequence; identical to SEQ ID NO: 19827
  Probe

SEQ ID NO: 47725 - DNA, 36 bp, Artificial Sequence; identical to SEQ ID NO: 5436
  Probe

SEQ ID NO: 47726 - DNA, 30 bp, Artificial Sequence; identical to SEQ ID NO: 19830
  Probe

SEQ ID NO: 47727 - DNA, 34 bp, Artificial Sequence; identical to SEQ ID NO: 19833
  Probe

SEQ ID NO: 47728 - DNA, 36 bp, Artificial Sequence; identical to SEQ ID NO: 5439
  Probe

SEQ ID NO: 47729 - DNA, 36 bp, Artificial Sequence; identical to SEQ ID NO: 19839
  Probe

SEQ ID NO: 47730 - DNA, 39 bp, Artificial Sequence
  Probe
gaaatacaacgatggtttttcatatcattggtcgtggtt

SEQ ID NO: 47731 - DNA, 46 bp, Artificial Sequence; identical to SEQ ID NO: 31213
  Probe

SEQ ID NO: 47732 - DNA, 50 bp, Artificial Sequence; identical to SEQ ID NO: 5440
  Probe

SEQ ID NO: 47733 - DNA, 36 bp, Artificial Sequence; identical to SEQ ID NO: 5445
  Probe

SEQ ID NO: 47734 - DNA, 39 bp, Artificial Sequence; identical to SEQ ID NO: 5448
  Probe

SEQ ID NO: 47735 - DNA, 19 bp, Artificial Sequence
  Probe
gaaccaacacctctttaca

SEQ ID NO: 47736 - DNA, 22 bp, Artificial Sequence
  Probe
gaaccaacacctctttacagtg

SEQ ID NO: 47737 - DNA, 23 bp, Artificial Sequence
  Probe
gaaccaacacctctttacagtga

SEQ ID NO: 47738 - DNA, 24 bp, Artificial Sequence
  Probe
gaaccaacacctctttacagtgaa

SEQ ID NO: 47739 - DNA, 25 bp, Artificial Sequence
  Probe
gaaccaacacctctttacagtgaaa

SEQ ID NO: 47740 - DNA, 26 bp, Artificial Sequence
  Probe
gaaccaacacctctttacagtgaaat

SEQ ID NO: 47741 - DNA, 18 bp, Artificial Sequence
  Probe
gaaccctgctcgctgcgg

SEQ ID NO: 47742 - DNA, 20 bp, Artificial Sequence
  Probe
gaacctcagagggggcagct

SEQ ID NO: 47743 - DNA, 27 bp, Artificial Sequence
  Probe
gaacctcagagggggcagctgccattt

SEQ ID NO: 47744 - DNA, 22 bp, Artificial Sequence
  Probe
gaacgttttaatccctgcaact

SEQ ID NO: 47745 - DNA, 16 bp, Artificial Sequence
  Probe
gaactgctaactcatg

SEQ ID NO: 47746 - DNA, 26 bp, Artificial Sequence
  Probe
gaactgctaactcatgcccccatgtc

SEQ ID NO: 47747 - DNA, 31 bp, Artificial Sequence; identical to SEQ ID NO: 19862
  Probe

SEQ ID NO: 47748 - DNA, 42 bp, Artificial Sequence; identical to SEQ ID NO: 5466
  Probe

SEQ ID NO: 47749 - DNA, 43 bp, Artificial Sequence; identical to SEQ ID NO: 5467
  Probe

SEQ ID NO: 47750 - DNA, 44 bp, Artificial Sequence; identical to SEQ ID NO: 5468
  Probe

SEQ ID NO: 47751 - DNA, 45 bp, Artificial Sequence; identical to SEQ ID NO: 5469
  Probe

SEQ ID NO: 47752 - DNA, 50 bp, Artificial Sequence; identical to SEQ ID NO: 5472
  Probe

SEQ ID NO: 47753 - DNA, 26 bp, Artificial Sequence
  Probe
gaagaagcagcttcaaacctgccggg

SEQ ID NO: 47754 - DNA, 27 bp, Artificial Sequence
  Probe
gaagaagcagcttcaaacctgccgggg

SEQ ID NO: 47755 - DNA, 28 bp, Artificial Sequence
  Probe
gaagaagcagcttcaaacctgccggggc

SEQ ID NO: 47756 - DNA, 29 bp, Artificial Sequence
  Probe
gaagaagcagcttcaaacctgccggggct

SEQ ID NO: 47757 - DNA, 30 bp, Artificial Sequence; identical to SEQ ID NO: 5478
  Probe

SEQ ID NO: 47758 - DNA, 31 bp, Artificial Sequence; identical to SEQ ID NO: 5479
  Probe

SEQ ID NO: 47759 - DNA, 32 bp, Artificial Sequence; identical to SEQ ID NO: 5480
  Probe

SEQ ID NO: 47760 - DNA, 33 bp, Artificial Sequence; identical to SEQ ID NO: 5481
  Probe

SEQ ID NO: 47761 - DNA, 23 bp, Artificial Sequence
  Probe
gaagagcccggatagctcagtcg

SEQ ID NO: 47762 - DNA, 29 bp, Artificial Sequence
  Probe
gaagattgagggttcgagtcccttcgtgg

SEQ ID NO: 47763 - DNA, 31 bp, Artificial Sequence; identical to SEQ ID NO: 19909
  Probe

SEQ ID NO: 47764 - DNA, 31 bp, Artificial Sequence
  Probe
gaagattgcaggttcgagtcctgccgcggtc

SEQ ID NO: 47765 - DNA, 16 bp, Artificial Sequence
  Probe
gaagcagcttcaaacc

SEQ ID NO: 47766 - DNA, 17 bp, Artificial Sequence
  Probe
gaagcagcttcaaacct

SEQ ID NO: 47767 - DNA, 24 bp, Artificial Sequence
  Probe
gaagcagcttcaaacctgccgggg

SEQ ID NO: 47768 - DNA, 25 bp, Artificial Sequence
  Probe
gaagcagcttcaaacctgccggggc

SEQ ID NO: 47769 - DNA, 27 bp, Artificial Sequence
  Probe
gaagcagcttcaaacctgccggggctt

SEQ ID NO: 47770 - DNA, 29 bp, Artificial Sequence
  Probe
gaagcagcttcaaacctgccggggcttct

SEQ ID NO: 47771 - DNA, 30 bp, Artificial Sequence; identical to SEQ ID NO: 5497
  Probe

SEQ ID NO: 47772 - DNA, 50 bp, Artificial Sequence; identical to SEQ ID NO: 5504
  Probe

SEQ ID NO: 47773 - DNA, 50 bp, Artificial Sequence; identical to SEQ ID NO: 5505
  Probe

SEQ ID NO: 47774 - DNA, 16 bp, Artificial Sequence
  Probe
gaagcgggtgctctta

SEQ ID NO: 47775 - DNA, 17 bp, Artificial Sequence
  Probe
gaagcgggtgctcttat

SEQ ID NO: 47776 - DNA, 18 bp, Artificial Sequence
  Probe
gaagcgggtgctcttatt

SEQ ID NO: 47777 - DNA, 19 bp, Artificial Sequence
  Probe
gaagcgggtgctcttattt

SEQ ID NO: 47778 - DNA, 20 bp, Artificial Sequence
  Probe
gaagcgggtgctcttatttt

SEQ ID NO: 47779 - DNA, 21 bp, Artificial Sequence
  Probe
gaagcgggtgctcttattttt

SEQ ID NO: 47780 - DNA, 35 bp, Artificial Sequence
  Probe
gaagcgtgctgggcccataacccagaggtcgatgg

SEQ ID NO: 47781 - DNA, 50 bp, Artificial Sequence
  Probe
gaagcgtgctgggcccataacccagaggtcgatggatcgaaaccatcctc

SEQ ID NO: 47782 - DNA, 33 bp, Artificial Sequence; identical to SEQ ID NO: 892
  Probe

SEQ ID NO: 47783 - DNA, 34 bp, Artificial Sequence; identical to SEQ ID NO: 5512
  Probe

SEQ ID NO: 47784 - DNA, 35 bp, Artificial Sequence; identical to SEQ ID NO: 5513
  Probe

SEQ ID NO: 47785 - DNA, 35 bp, Artificial Sequence; identical to SEQ ID NO: 5515
  Probe

SEQ ID NO: 47786 - DNA, 32 bp, Artificial Sequence
  Probe
gaaggttgcgtgttcaaatcacgtcggggtca

SEQ ID NO: 47787 - DNA, 35 bp, Artificial Sequence; identical to SEQ ID NO: 5516
  Probe

SEQ ID NO: 47788 - DNA, 20 bp, Artificial Sequence
  Probe
gaatcacgtcggggtcaaac

SEQ ID NO: 47789 - DNA, 36 bp, Artificial Sequence; identical to SEQ ID NO: 19958
  Probe

SEQ ID NO: 47790 - DNA, 38 bp, Artificial Sequence; identical to SEQ ID NO: 19959
  Probe

SEQ ID NO: 47791 - DNA, 39 bp, Artificial Sequence; identical to SEQ ID NO: 5522
  Probe

SEQ ID NO: 47792 - DNA, 40 bp, Artificial Sequence; identical to SEQ ID NO: 5523
  Probe

SEQ ID NO: 47793 - DNA, 38 bp, Artificial Sequence; identical to SEQ ID NO: 19962
  Probe

SEQ ID NO: 47794 - DNA, 37 bp, Artificial Sequence; identical to SEQ ID NO: 13332
  Probe

SEQ ID NO: 47795 - DNA, 38 bp, Artificial Sequence; identical to SEQ ID NO: 13333
  Probe

SEQ ID NO: 47796 - DNA, 39 bp, Artificial Sequence; identical to SEQ ID NO: 5525
  Probe

SEQ ID NO: 47797 - DNA, 40 bp, Artificial Sequence; identical to SEQ ID NO: 5526
  Probe

SEQ ID NO: 47798 - DNA, 19 bp, Artificial Sequence
  Probe
gaatcccaccgctgccaca

SEQ ID NO: 47799 - DNA, 20 bp, Artificial Sequence
  Probe
gaatcccaccgctgccacac

SEQ ID NO: 47800 - DNA, 20 bp, Artificial Sequence
  Probe
gaatcccaccgctgccaggt

SEQ ID NO: 47801 - DNA, 17 bp, Artificial Sequence
  Probe
gaatcccactcctgaca

SEQ ID NO: 47802 - DNA, 17 bp, Artificial Sequence
  Probe
gaatcccacttctgaca

SEQ ID NO: 47803 - DNA, 18 bp, Artificial Sequence
  Probe
gaatcccacttctgacac

SEQ ID NO: 47804 - DNA, 17 bp, Artificial Sequence
  Probe
gaatcccagcggtgcct

SEQ ID NO: 47805 - DNA, 20 bp, Artificial Sequence
  Probe
gaatcccagcggtgcctccg

SEQ ID NO: 47806 - DNA, 19 bp, Artificial Sequence
  Probe
gaatcccatcctcgtcgct

SEQ ID NO: 47807 - DNA, 20 bp, Artificial Sequence
  Probe
gaatccggctcgaaggacga

SEQ ID NO: 47808 - DNA, 18 bp, Artificial Sequence
  Probe
gaatcctgccgactacga

SEQ ID NO: 47809 - DNA, 18 bp, Artificial Sequence
  Probe
gaatcctgccgactacgg

SEQ ID NO: 47810 - DNA, 20 bp, Artificial Sequence
  Probe
gaatcctgccgactacggca

SEQ ID NO: 47811 - DNA, 18 bp, Artificial Sequence
  Probe
gaatcctgccgactacgt

SEQ ID NO: 47812 - DNA, 20 bp, Artificial Sequence
  Probe
gaatcctgccgactacgtca

SEQ ID NO: 47813 - DNA, 27 bp, Artificial Sequence
  Probe
gaatctgacaacagaggcttacgaccc

SEQ ID NO: 47814 - DNA, 28 bp, Artificial Sequence
  Probe
gaatctgacaacagaggcttacgacccc

SEQ ID NO: 47815 - DNA, 38 bp, Artificial Sequence; identical to SEQ ID NO: 5537
  Probe

SEQ ID NO: 47816 - DNA, 39 bp, Artificial Sequence; identical to SEQ ID NO: 5538
  Probe

SEQ ID NO: 47817 - DNA, 40 bp, Artificial Sequence; identical to SEQ ID NO: 5539
  Probe

SEQ ID NO: 47818 - DNA, 28 bp, Artificial Sequence
  Probe
gaatcttagctttgggtgctaatggtgg

SEQ ID NO: 47819 - DNA, 33 bp, Artificial Sequence; identical to SEQ ID NO: 5540
  Probe

SEQ ID NO: 47820 - DNA, 37 bp, Artificial Sequence; identical to SEQ ID NO: 19988
  Probe

SEQ ID NO: 47821 - DNA, 38 bp, Artificial Sequence
  Probe
gaatcttagctttgggtgctaatggtggagttaaagac

SEQ ID NO: 47822 - DNA, 50 bp, Artificial Sequence; identical to SEQ ID NO: 5541
  Probe

SEQ ID NO: 47823 - DNA, 46 bp, Artificial Sequence
  Probe
gaatgatttcgactcattaaattatgataatcatatttaccaaatg

SEQ ID NO: 47824 - DNA, 25 bp, Artificial Sequence
  Probe
gaattgcaaattcgaagaagcagct

SEQ ID NO: 47825 - DNA, 32 bp, Artificial Sequence
  Probe
gaattgcaaattcgaagaagcagcttcaaacc

SEQ ID NO: 47826 - DNA, 33 bp, Artificial Sequence
  Probe
gaattgcaaattcgaagaagcagcttcaaacct

SEQ ID NO: 47827 - DNA, 40 bp, Artificial Sequence
  Probe
gaattgcaaattcgaagaagcagcttcaaacctgccgggg

SEQ ID NO: 47828 - DNA, 45 bp, Artificial Sequence; identical to SEQ ID NO: 5544
  Probe

SEQ ID NO: 47829 - DNA, 46 bp, Artificial Sequence; identical to SEQ ID NO: 5545
  Probe

SEQ ID NO: 47830 - DNA, 16 bp, Artificial Sequence
  Probe
gacaacagaggcttac

SEQ ID NO: 47831 - DNA, 19 bp, Artificial Sequence
  Probe
gacaacagaggcttacgac

SEQ ID NO: 47832 - DNA, 23 bp, Artificial Sequence
  Probe
gacaacagaggcttacgacccct

SEQ ID NO: 47833 - DNA, 24 bp, Artificial Sequence
  Probe
gacaacagaggcttacgacccctt

SEQ ID NO: 47834 - DNA, 28 bp, Artificial Sequence
  Probe
gacaacagaggcttacgaccccttattt

SEQ ID NO: 47835 - DNA, 29 bp, Artificial Sequence
  Probe
gacaacagaggcttacgaccccttattta

SEQ ID NO: 47836 - DNA, 32 bp, Artificial Sequence; identical to SEQ ID NO: 5551
  Probe

SEQ ID NO: 47837 - DNA, 33 bp, Artificial Sequence; identical to SEQ ID NO: 5552
  Probe

SEQ ID NO: 47838 - DNA, 34 bp, Artificial Sequence; identical to SEQ ID NO: 5553
  Probe

SEQ ID NO: 47839 - DNA, 21 bp, Artificial Sequence
  Probe
gacaacattcaaaaaagagta

SEQ ID NO: 47840 - DNA, 22 bp, Artificial Sequence
  Probe
gacaacattcaaaaaagagtaa

SEQ ID NO: 47841 - DNA, 23 bp, Artificial Sequence
  Probe
gacaacattcaaaaaagagtaat

SEQ ID NO: 47842 - DNA, 24 bp, Artificial Sequence
  Probe
gacaacattcaaaaaagagtaata

SEQ ID NO: 47843 - DNA, 16 bp, Artificial Sequence
  Probe
gacaagtgcggttttt

SEQ ID NO: 47844 - DNA, 17 bp, Artificial Sequence
  Probe
gacaagtgcggtttttt

SEQ ID NO: 47845 - DNA, 26 bp, Artificial Sequence
  Probe
gacaggggttaggcctctttttacca

SEQ ID NO: 47846 - DNA, 28 bp, Artificial Sequence
  Probe
gacaggggttaggcctctttttaccagc

SEQ ID NO: 47847 - DNA, 29 bp, Artificial Sequence
  Probe
gacaggggttaggcctctttttaccagct

SEQ ID NO: 47848 - DNA, 27 bp, Artificial Sequence
  Probe
gaccaagagccttcaaagccctcagta

SEQ ID NO: 47849 - DNA, 34 bp, Artificial Sequence; identical to SEQ ID NO: 5560
  Probe

SEQ ID NO: 47850 - DNA, 19 bp, Artificial Sequence
  Probe
gaccacgtggcctaatgga

SEQ ID NO: 47851 - DNA, 18 bp, Artificial Sequence
  Probe
gacccagtggcctaatgg

SEQ ID NO: 47852 - DNA, 19 bp, Artificial Sequence
  Probe
gacccagtggcctaatgga

SEQ ID NO: 47853 - DNA, 20 bp, Artificial Sequence
  Probe
gacccagtggcctaatggat

SEQ ID NO: 47854 - DNA, 23 bp, Artificial Sequence
  Probe
gacccagtggcctaatggataag

SEQ ID NO: 47855 - DNA, 28 bp, Artificial Sequence
  Probe
gacccagtggcctaatggataaggcatc

SEQ ID NO: 47856 - DNA, 37 bp, Artificial Sequence
  Probe
gacccagtggcctaatggataaggcatcagcctccgg

SEQ ID NO: 47857 - DNA, 22 bp, Artificial Sequence
  Probe
gacccgggttcgattcccggcc

SEQ ID NO: 47858 - DNA, 31 bp, Artificial Sequence; identical to SEQ ID NO: 5567
  Probe

SEQ ID NO: 47859 - DNA, 30 bp, Artificial Sequence
  Probe
gacccgggttcgattcccggccaacgcagc

SEQ ID NO: 47860 - DNA, 31 bp, Artificial Sequence; identical to SEQ ID NO: 5568
  Probe

SEQ ID NO: 47861 - DNA, 28 bp, Artificial Sequence
  Probe
gacccttttggatgttcgcaaccccttt

SEQ ID NO: 47862 - DNA, 19 bp, Artificial Sequence
  Probe
gaccgcgtggcctaatgga

SEQ ID NO: 47863 - DNA, 31 bp, Artificial Sequence
  Probe
gaccgcgtggcctaatggataaggcgtctga

SEQ ID NO: 47864 - DNA, 26 bp, Artificial Sequence
  Probe
gaccggggttcaattccccgacgggg

SEQ ID NO: 47865 - DNA, 29 bp, Artificial Sequence
  Probe
gaccggggttcaattccccgacggggagg

SEQ ID NO: 47866 - DNA, 31 bp, Artificial Sequence; identical to SEQ ID NO: 5571
  Probe

SEQ ID NO: 47867 - DNA, 22 bp, Artificial Sequence
  Probe
gaccggggttcgattccccgac

SEQ ID NO: 47868 - DNA, 23 bp, Artificial Sequence
  Probe
gaccggggttcgattccccgacg

SEQ ID NO: 47869 - DNA, 24 bp, Artificial Sequence
  Probe
gaccggggttcgattccccgacgg

SEQ ID NO: 47870 - DNA, 25 bp, Artificial Sequence
  Probe
gaccggggttcgattccccgacggg

SEQ ID NO: 47871 - DNA, 29 bp, Artificial Sequence
  Probe
gaccggggttcgattccccgacggggaga

SEQ ID NO: 47872 - DNA, 30 bp, Artificial Sequence; identical to SEQ ID NO: 5576
  Probe

SEQ ID NO: 47873 - DNA, 31 bp, Artificial Sequence; identical to SEQ ID NO: 5577
  Probe

SEQ ID NO: 47874 - DNA, 29 bp, Artificial Sequence
  Probe
gaccggggttcgattccccgacggggagg

SEQ ID NO: 47875 - DNA, 30 bp, Artificial Sequence; identical to SEQ ID NO: 5579
  Probe

SEQ ID NO: 47876 - DNA, 31 bp, Artificial Sequence; identical to SEQ ID NO: 5580
  Probe

SEQ ID NO: 47877 - DNA, 31 bp, Artificial Sequence; identical to SEQ ID NO: 5581
  Probe

SEQ ID NO: 47878 - DNA, 30 bp, Artificial Sequence
  Probe
gacctcgtggcgcaacggtagcgcgtctga

SEQ ID NO: 47879 - DNA, 33 bp, Artificial Sequence
  Probe
gacctcgtggcgcaacggtagcgcgtctgactc

SEQ ID NO: 47880 - DNA, 34 bp, Artificial Sequence; identical to SEQ ID NO: 31336
  Probe

SEQ ID NO: 47881 - DNA, 33 bp, Artificial Sequence; identical to SEQ ID NO: 5583
  Probe

SEQ ID NO: 47882 - DNA, 16 bp, Artificial Sequence
  Probe
gacgaggtggccgagt

SEQ ID NO: 47883 - DNA, 18 bp, Artificial Sequence
  Probe
gacgaggtggccgagtgg

SEQ ID NO: 47884 - DNA, 20 bp, Artificial Sequence
  Probe
gacgaggtggccgagtggtt

SEQ ID NO: 47885 - DNA, 21 bp, Artificial Sequence
  Probe
gacgaggtggccgagtggtta

SEQ ID NO: 47886 - DNA, 23 bp, Artificial Sequence
  Probe
gacgaggtggccgagtggttaag

SEQ ID NO: 47887 - DNA, 24 bp, Artificial Sequence
  Probe
gacgaggtggccgagtggttaagg

SEQ ID NO: 47888 - DNA, 17 bp, Artificial Sequence
  Probe
gacgggctcacatcacc

SEQ ID NO: 47889 - DNA, 18 bp, Artificial Sequence
  Probe
gacgggctcacatcaccc

SEQ ID NO: 47890 - DNA, 19 bp, Artificial Sequence
  Probe
gacgggctcacatcacccc

SEQ ID NO: 47891 - DNA, 20 bp, Artificial Sequence
  Probe
gacgggctcacatcacccca

SEQ ID NO: 47892 - DNA, 21 bp, Artificial Sequence
  Probe
gacgggctcacatcaccccat

SEQ ID NO: 47893 - DNA, 22 bp, Artificial Sequence
  Probe
gacgggctcacatcaccccata

SEQ ID NO: 47894 - DNA, 23 bp, Artificial Sequence
  Probe
gacgggctcacatcaccccataa

SEQ ID NO: 47895 - DNA, 26 bp, Artificial Sequence
  Probe
gacgggctcacatcaccccataaaca

SEQ ID NO: 47896 - DNA, 27 bp, Artificial Sequence
  Probe
gacgggctcacatcaccccataaacaa

SEQ ID NO: 47897 - DNA, 28 bp, Artificial Sequence
  Probe
gacgggctcacatcaccccataaacaaa

SEQ ID NO: 47898 - DNA, 29 bp, Artificial Sequence
  Probe
gacgggctcacatcaccccataaacaaat

SEQ ID NO: 47899 - DNA, 16 bp, Artificial Sequence
  Probe
gactacaaaaaggatt

SEQ ID NO: 47900 - DNA, 21 bp, Artificial Sequence
  Probe
gactacaaaaaggattagact

SEQ ID NO: 47901 - DNA, 22 bp, Artificial Sequence
  Probe
gactacaaaaaggattagactg

SEQ ID NO: 47902 - DNA, 23 bp, Artificial Sequence
  Probe
gactacaaaaaggattagactga

SEQ ID NO: 47903 - DNA, 24 bp, Artificial Sequence
  Probe
gactacaaaaaggattagactgaa

SEQ ID NO: 47904 - DNA, 25 bp, Artificial Sequence
  Probe
gactacaaaaaggattagactgaac

SEQ ID NO: 47905 - DNA, 26 bp, Artificial Sequence
  Probe
gactacaaaaaggattagactgaacc

SEQ ID NO: 47906 - DNA, 27 bp, Artificial Sequence
  Probe
gactacaaaaaggattagactgaaccg

SEQ ID NO: 47907 - DNA, 28 bp, Artificial Sequence
  Probe
gactacaaaaaggattagactgaaccga

SEQ ID NO: 47908 - DNA, 29 bp, Artificial Sequence
  Probe
gactacaaaaaggattagactgaaccgaa

SEQ ID NO: 47909 - DNA, 31 bp, Artificial Sequence; identical to SEQ ID NO: 31363
  Probe

SEQ ID NO: 47910 - DNA, 18 bp, Artificial Sequence
  Probe
gactatgagaatcgaacc

SEQ ID NO: 47911 - DNA, 29 bp, Artificial Sequence
  Probe
gactatgagaatcgaacccatccctgaga

SEQ ID NO: 47912 - DNA, 31 bp, Artificial Sequence; identical to SEQ ID NO: 5606
  Probe

SEQ ID NO: 47913 - DNA, 32 bp, Artificial Sequence; identical to SEQ ID NO: 20129
  Probe

SEQ ID NO: 47914 - DNA, 34 bp, Artificial Sequence; identical to SEQ ID NO: 20130
  Probe

SEQ ID NO: 47915 - DNA, 35 bp, Artificial Sequence
  Probe
gactcattaaattatgataatcatatttaccaaat

SEQ ID NO: 47916 - DNA, 36 bp, Artificial Sequence; identical to SEQ ID NO: 5607
  Probe

SEQ ID NO: 47917 - DNA, 20 bp, Artificial Sequence
  Probe
gactcccggtatgggaacaa

SEQ ID NO: 47918 - DNA, 19 bp, Artificial Sequence
  Probe
gactcccggtgtgggaacg

SEQ ID NO: 47919 - DNA, 20 bp, Artificial Sequence
  Probe
gactcccggtgtgggaacgc

SEQ ID NO: 47920 - DNA, 22 bp, Artificial Sequence
  Probe
gactctgaatccagcgatccga

SEQ ID NO: 47921 - DNA, 46 bp, Artificial Sequence; identical to SEQ ID NO: 20140
  Probe

SEQ ID NO: 47922 - DNA, 44 bp, Artificial Sequence; identical to SEQ ID NO: 5610
  Probe

SEQ ID NO: 47923 - DNA, 16 bp, Artificial Sequence
  Probe
gagaaagctcacaaga

SEQ ID NO: 47924 - DNA, 17 bp, Artificial Sequence
  Probe
gagaaagctcacaagaa

SEQ ID NO: 47925 - DNA, 24 bp, Artificial Sequence
  Probe
gagaaagctcacaagaactgctaa

SEQ ID NO: 47926 - DNA, 33 bp, Artificial Sequence; identical to SEQ ID NO: 935
  Probe

SEQ ID NO: 47927 - DNA, 34 bp, Artificial Sequence; identical to SEQ ID NO: 936
  Probe

SEQ ID NO: 47928 - DNA, 37 bp, Artificial Sequence; identical to SEQ ID NO: 939
  Probe

SEQ ID NO: 47929 - DNA, 46 bp, Artificial Sequence; identical to SEQ ID NO: 948
  Probe

SEQ ID NO: 47930 - DNA, 48 bp, Artificial Sequence; identical to SEQ ID NO: 5613
  Probe

SEQ ID NO: 47931 - DNA, 24 bp, Artificial Sequence
  Probe
gagaaccaacacctctttacagtg

SEQ ID NO: 47932 - DNA, 25 bp, Artificial Sequence
  Probe
gagaaccaacacctctttacagtga

SEQ ID NO: 47933 - DNA, 26 bp, Artificial Sequence
  Probe
gagaaccaacacctctttacagtgaa

SEQ ID NO: 47934 - DNA, 27 bp, Artificial Sequence
  Probe
gagaaccaacacctctttacagtgaaa

SEQ ID NO: 47935 - DNA, 28 bp, Artificial Sequence
  Probe
gagaaccaacacctctttacagtgaaat

SEQ ID NO: 47936 - DNA, 30 bp, Artificial Sequence; identical to SEQ ID NO: 20156
  Probe

SEQ ID NO: 47937 - DNA, 23 bp, Artificial Sequence
  Probe
gagaccggggttcaattccccga

SEQ ID NO: 47938 - DNA, 28 bp, Artificial Sequence
  Probe
gagaccggggttcaattccccgacgggg

SEQ ID NO: 47939 - DNA, 31 bp, Artificial Sequence; identical to SEQ ID NO: 5617
  Probe

SEQ ID NO: 47940 - DNA, 33 bp, Artificial Sequence; identical to SEQ ID NO: 5618
  Probe

SEQ ID NO: 47941 - DNA, 23 bp, Artificial Sequence
  Probe
gagaccggggttcgattccccga

SEQ ID NO: 47942 - DNA, 25 bp, Artificial Sequence
  Probe
gagaccggggttcgattccccgacg

SEQ ID NO: 47943 - DNA, 26 bp, Artificial Sequence
  Probe
gagaccggggttcgattccccgacgg

SEQ ID NO: 47944 - DNA, 27 bp, Artificial Sequence
  Probe
gagaccggggttcgattccccgacggg

SEQ ID NO: 47945 - DNA, 31 bp, Artificial Sequence; identical to SEQ ID NO: 5620
  Probe

SEQ ID NO: 47946 - DNA, 32 bp, Artificial Sequence; identical to SEQ ID NO: 5621
  Probe

SEQ ID NO: 47947 - DNA, 33 bp, Artificial Sequence; identical to SEQ ID NO: 20164
  Probe

SEQ ID NO: 47948 - DNA, 32 bp, Artificial Sequence; identical to SEQ ID NO: 5622
  Probe

SEQ ID NO: 47949 - DNA, 33 bp, Artificial Sequence; identical to SEQ ID NO: 20166
  Probe

SEQ ID NO: 47950 - DNA, 33 bp, Artificial Sequence; identical to SEQ ID NO: 5623
  Probe

SEQ ID NO: 47951 - DNA, 31 bp, Artificial Sequence; identical to SEQ ID NO: 5624
  Probe

SEQ ID NO: 47952 - DNA, 32 bp, Artificial Sequence; identical to SEQ ID NO: 5625
  Probe

SEQ ID NO: 47953 - DNA, 33 bp, Artificial Sequence; identical to SEQ ID NO: 5626
  Probe

SEQ ID NO: 47954 - DNA, 32 bp, Artificial Sequence; identical to SEQ ID NO: 20189
  Probe

SEQ ID NO: 47955 - DNA, 33 bp, Artificial Sequence; identical to SEQ ID NO: 20190
  Probe

SEQ ID NO: 47956 - DNA, 34 bp, Artificial Sequence; identical to SEQ ID NO: 13397
  Probe

SEQ ID NO: 47957 - DNA, 36 bp, Artificial Sequence; identical to SEQ ID NO: 5628
  Probe

SEQ ID NO: 47958 - DNA, 32 bp, Artificial Sequence
  Probe
gagatcctgggttcgaatcccagcggggcctg

SEQ ID NO: 47959 - DNA, 32 bp, Artificial Sequence
  Probe
gagatcctgggttcgaatcccagcggggcctt

SEQ ID NO: 47960 - DNA, 28 bp, Artificial Sequence
  Probe
gagatcctgggttcgaatcccagcggtg

SEQ ID NO: 47961 - DNA, 29 bp, Artificial Sequence
  Probe
gagatcctgggttcgaatcccagcggtgc

SEQ ID NO: 47962 - DNA, 30 bp, Artificial Sequence; identical to SEQ ID NO: 20192
  Probe

SEQ ID NO: 47963 - DNA, 31 bp, Artificial Sequence
  Probe
gagatcctgggttcgaatcccagcggtgcct

SEQ ID NO: 47964 - DNA, 32 bp, Artificial Sequence; identical to SEQ ID NO: 5629
  Probe

SEQ ID NO: 47965 - DNA, 34 bp, Artificial Sequence; identical to SEQ ID NO: 20193
  Probe

SEQ ID NO: 47966 - DNA, 18 bp, Artificial Sequence
  Probe
gagatgaaaacctttttc

SEQ ID NO: 47967 - DNA, 19 bp, Artificial Sequence
  Probe
gagatgaaaacctttttcc

SEQ ID NO: 47968 - DNA, 22 bp, Artificial Sequence
  Probe
gagatgaaaacctttttccaag

SEQ ID NO: 47969 - DNA, 23 bp, Artificial Sequence
  Probe
gagatgaaaacctttttccaagg

SEQ ID NO: 47970 - DNA, 24 bp, Artificial Sequence
  Probe
gagatgaaaacctttttccaagga

SEQ ID NO: 47971 - DNA, 26 bp, Artificial Sequence
  Probe
gagatgaaaacctttttccaaggaca

SEQ ID NO: 47972 - DNA, 27 bp, Artificial Sequence
  Probe
gagatgaaaacctttttccaaggacaa

SEQ ID NO: 47973 - DNA, 28 bp, Artificial Sequence
  Probe
gagatgaaaacctttttccaaggacaaa

SEQ ID NO: 47974 - DNA, 29 bp, Artificial Sequence
  Probe
gagatgaaaacctttttccaaggacaaat

SEQ ID NO: 47975 - DNA, 22 bp, Artificial Sequence
  Probe
gagatttcaacttaacttgacc

SEQ ID NO: 47976 - DNA, 23 bp, Artificial Sequence
  Probe
gagatttcaacttaacttgaccg

SEQ ID NO: 47977 - DNA, 24 bp, Artificial Sequence
  Probe
gagatttcaacttaacttgaccgc

SEQ ID NO: 47978 - DNA, 25 bp, Artificial Sequence
  Probe
gagatttcaacttaacttgaccgct

SEQ ID NO: 47979 - DNA, 26 bp, Artificial Sequence
  Probe
gagatttcaacttaacttgaccgctc

SEQ ID NO: 47980 - DNA, 27 bp, Artificial Sequence
  Probe
gagatttcaacttaacttgaccgctct

SEQ ID NO: 47981 - DNA, 28 bp, Artificial Sequence
  Probe
gagatttcaacttaacttgaccgctctg

SEQ ID NO: 47982 - DNA, 29 bp, Artificial Sequence
  Probe
gagatttcaacttaacttgaccgctctga

SEQ ID NO: 47983 - DNA, 30 bp, Artificial Sequence; identical to SEQ ID NO: 5641
  Probe

SEQ ID NO: 47984 - DNA, 31 bp, Artificial Sequence; identical to SEQ ID NO: 5642
  Probe

SEQ ID NO: 47985 - DNA, 32 bp, Artificial Sequence; identical to SEQ ID NO: 5643
  Probe

SEQ ID NO: 47986 - DNA, 30 bp, Artificial Sequence; identical to SEQ ID NO: 13398
  Probe

SEQ ID NO: 47987 - DNA, 48 bp, Artificial Sequence
  Probe
gagcatagctgccttccaagcagttgacccgggttcgattcccggcca

SEQ ID NO: 47988 - DNA, 49 bp, Artificial Sequence
  Probe
gagcatagctgccttccaagcagttgacccgggttcgattcccggccaa

SEQ ID NO: 47989 - DNA, 50 bp, Artificial Sequence
  Probe
gagcatagctgccttccaagcagttgacccgggttcgattcccggccaac

SEQ ID NO: 47990 - DNA, 50 bp, Artificial Sequence
  Probe
gagcatgagactcttaatctcagggtcgtgggttcgagccccacgttggg

SEQ ID NO: 47991 - DNA, 28 bp, Artificial Sequence
  Probe
gagcatgggactcttaatcccagggtcg

SEQ ID NO: 47992 - DNA, 30 bp, Artificial Sequence; identical to SEQ ID NO: 5654
  Probe

SEQ ID NO: 47993 - DNA, 50 bp, Artificial Sequence
  Probe
gagcatgggactcttaatcccagggtcgtgggttcgagccccacgttggg

SEQ ID NO: 47994 - DNA, 17 bp, Artificial Sequence
  Probe
gagcccacccagggacg

SEQ ID NO: 47995 - DNA, 18 bp, Artificial Sequence
  Probe
gagcccacccagggacgc

SEQ ID NO: 47996 - DNA, 19 bp, Artificial Sequence
  Probe
gagcccacccagggacgcc

SEQ ID NO: 47997 - DNA, 16 bp, Artificial Sequence
  Probe
gagccccagtggaacc

SEQ ID NO: 47998 - DNA, 18 bp, Artificial Sequence
  Probe
gagccccagtggaaccac

SEQ ID NO: 47999 - DNA, 19 bp, Artificial Sequence
  Probe
gagccccagtggaaccacg

SEQ ID NO: 48000 - DNA, 17 bp, Artificial Sequence
  Probe
gagcccggtaatcgcat

SEQ ID NO: 48001 - DNA, 20 bp, Artificial Sequence
  Probe
gagcccggtaatcgcataaa

SEQ ID NO: 48002 - DNA, 23 bp, Artificial Sequence
  Probe
gagcccggtaatcgcataaaact

SEQ ID NO: 48003 - DNA, 27 bp, Artificial Sequence
  Probe
gagcccggtaatcgcataaaacttaaa

SEQ ID NO: 48004 - DNA, 28 bp, Artificial Sequence
  Probe
gagcccggtaatcgcataaaacttaaaa

SEQ ID NO: 48005 - DNA, 31 bp, Artificial Sequence; identical to SEQ ID NO: 961
  Probe

SEQ ID NO: 48006 - DNA, 32 bp, Artificial Sequence; identical to SEQ ID NO: 5657
  Probe

SEQ ID NO: 48007 - DNA, 33 bp, Artificial Sequence; identical to SEQ ID NO: 5658
  Probe

SEQ ID NO: 48008 - DNA, 36 bp, Artificial Sequence; identical to SEQ ID NO: 31455
  Probe

SEQ ID NO: 48009 - DNA, 37 bp, Artificial Sequence
  Probe
gagcccggtaatcgcataaaacttaaaactttacagt

SEQ ID NO: 48010 - DNA, 46 bp, Artificial Sequence; identical to SEQ ID NO: 5661
  Probe

SEQ ID NO: 48011 - DNA, 49 bp, Artificial Sequence; identical to SEQ ID NO: 5662
  Probe

SEQ ID NO: 48012 - DNA, 25 bp, Artificial Sequence
  Probe
gagcctcacctggagcaagaccctt

SEQ ID NO: 48013 - DNA, 50 bp, Artificial Sequence
  Probe
gagcgttggtggtatagtggtaagcatagctgccttccaagcagttgacc

SEQ ID NO: 48014 - DNA, 16 bp, Artificial Sequence
  Probe
gagcttaaaccccctt

SEQ ID NO: 48015 - DNA, 17 bp, Artificial Sequence
  Probe
gagcttaaaccccctta

SEQ ID NO: 48016 - DNA, 21 bp, Artificial Sequence
  Probe
gagcttaaacccccttatttc

SEQ ID NO: 48017 - DNA, 23 bp, Artificial Sequence
  Probe
gagcttaaacccccttatttcta

SEQ ID NO: 48018 - DNA, 24 bp, Artificial Sequence
  Probe
gagcttaaacccccttatttctag

SEQ ID NO: 48019 - DNA, 25 bp, Artificial Sequence
  Probe
gagcttaaacccccttatttctagg

SEQ ID NO: 48020 - DNA, 26 bp, Artificial Sequence
  Probe
gagcttaaacccccttatttctagga

SEQ ID NO: 48021 - DNA, 25 bp, Artificial Sequence
  Probe
gaggccccgggttcgatccccggca

SEQ ID NO: 48022 - DNA, 31 bp, Artificial Sequence; identical to SEQ ID NO: 40106
  Probe

SEQ ID NO: 48023 - DNA, 34 bp, Artificial Sequence; identical to SEQ ID NO: 20295
  Probe

SEQ ID NO: 48024 - DNA, 28 bp, Artificial Sequence
  Probe
gaggcgtgggttcgaatcccacttctga

SEQ ID NO: 48025 - DNA, 16 bp, Artificial Sequence
  Probe
gaggcttacgacccct

SEQ ID NO: 48026 - DNA, 18 bp, Artificial Sequence
  Probe
gaggcttacgacccctta

SEQ ID NO: 48027 - DNA, 24 bp, Artificial Sequence
  Probe
gaggcttacgaccccttatttacc

SEQ ID NO: 48028 - DNA, 25 bp, Artificial Sequence
  Probe
gaggcttacgaccccttatttaccg

SEQ ID NO: 48029 - DNA, 27 bp, Artificial Sequence
  Probe
gaggcttacgaccccttatttaccgag

SEQ ID NO: 48030 - DNA, 30 bp, Artificial Sequence; identical to SEQ ID NO: 10159
  Probe

SEQ ID NO: 48031 - DNA, 46 bp, Artificial Sequence; identical to SEQ ID NO: 40111
  Probe

SEQ ID NO: 48032 - DNA, 50 bp, Artificial Sequence; identical to SEQ ID NO: 40112
  Probe

SEQ ID NO: 48033 - DNA, 27 bp, Artificial Sequence
  Probe
gaggtcccgggttcaaatcccggacga

SEQ ID NO: 48034 - DNA, 31 bp, Artificial Sequence
  Probe
gaggtcccgggttcaaatcccggacgagccc

SEQ ID NO: 48035 - DNA, 31 bp, Artificial Sequence
  Probe
gaggtcccgggttcgatccccagcatctcca

SEQ ID NO: 48036 - DNA, 29 bp, Artificial Sequence
  Probe
gaggttgtgagttcgagcctcacctggag

SEQ ID NO: 48037 - DNA, 31 bp, Artificial Sequence; identical to SEQ ID NO: 5673
  Probe

SEQ ID NO: 48038 - DNA, 33 bp, Artificial Sequence
  Probe
gaggttgtgagttcgagcctcacctggagcatt

SEQ ID NO: 48039 - DNA, 34 bp, Artificial Sequence; identical to SEQ ID NO: 5674
  Probe

SEQ ID NO: 48040 - DNA, 18 bp, Artificial Sequence
  Probe
gagtaaataataggagct

SEQ ID NO: 48041 - DNA, 24 bp, Artificial Sequence
  Probe
gagtaaataataggagcttaaacc

SEQ ID NO: 48042 - DNA, 25 bp, Artificial Sequence
  Probe
gagtaaataataggagcttaaaccc

SEQ ID NO: 48043 - DNA, 31 bp, Artificial Sequence; identical to SEQ ID NO: 970
  Probe

SEQ ID NO: 48044 - DNA, 32 bp, Artificial Sequence; identical to SEQ ID NO: 5679
  Probe

SEQ ID NO: 48045 - DNA, 34 bp, Artificial Sequence; identical to SEQ ID NO: 20333
  Probe

SEQ ID NO: 48046 - DNA, 37 bp, Artificial Sequence; identical to SEQ ID NO: 5680
  Probe

SEQ ID NO: 48047 - DNA, 38 bp, Artificial Sequence; identical to SEQ ID NO: 5681
  Probe

SEQ ID NO: 48048 - DNA, 39 bp, Artificial Sequence; identical to SEQ ID NO: 5682
  Probe

SEQ ID NO: 48049 - DNA, 40 bp, Artificial Sequence; identical to SEQ ID NO: 5683
  Probe

SEQ ID NO: 48050 - DNA, 43 bp, Artificial Sequence; identical to SEQ ID NO: 5684
  Probe

SEQ ID NO: 48051 - DNA, 50 bp, Artificial Sequence; identical to SEQ ID NO: 5686
  Probe

SEQ ID NO: 48052 - DNA, 19 bp, Artificial Sequence
  Probe
gagtcccatctggggtggc

SEQ ID NO: 48053 - DNA, 19 bp, Artificial Sequence
  Probe
gagtcccttcgtggtcgtc

SEQ ID NO: 48054 - DNA, 17 bp, Artificial Sequence
  Probe
gagtgaagcattggact

SEQ ID NO: 48055 - DNA, 19 bp, Artificial Sequence
  Probe
gagtgaagcattggactgt

SEQ ID NO: 48056 - DNA, 20 bp, Artificial Sequence
  Probe
gagtgaagcattggactgta

SEQ ID NO: 48057 - DNA, 23 bp, Artificial Sequence
  Probe
gagtgaagcattggactgtaaat

SEQ ID NO: 48058 - DNA, 25 bp, Artificial Sequence
  Probe
gagtggggttttgcagtccttagct

SEQ ID NO: 48059 - DNA, 25 bp, Artificial Sequence
  Probe
gagtgtagcttaacacaaagcaccc

SEQ ID NO: 48060 - DNA, 28 bp, Artificial Sequence
  Probe
gagtgtagcttaacacaaagcacccaac

SEQ ID NO: 48061 - DNA, 29 bp, Artificial Sequence
  Probe
gagtgtagcttaacacaaagcacccaact

SEQ ID NO: 48062 - DNA, 20 bp, Artificial Sequence
  Probe
gagtgtcaggatggccgagt

SEQ ID NO: 48063 - DNA, 24 bp, Artificial Sequence
  Probe
gagttaaagactttttctctgatt

SEQ ID NO: 48064 - DNA, 25 bp, Artificial Sequence
  Probe
gagttaaagactttttctctgattt

SEQ ID NO: 48065 - DNA, 23 bp, Artificial Sequence
  Probe
gagttcaaatctcggtggaacct

SEQ ID NO: 48066 - DNA, 26 bp, Artificial Sequence
  Probe
gagttcaaatctcggtggaacctgca

SEQ ID NO: 48067 - DNA, 23 bp, Artificial Sequence
  Probe
gagttcaaatctcggtgggacct

SEQ ID NO: 48068 - DNA, 26 bp, Artificial Sequence
  Probe
gagttcaaatctcggtgggacctcac

SEQ ID NO: 48069 - DNA, 26 bp, Artificial Sequence
  Probe
gagttcgaacctcagagggggcagct

SEQ ID NO: 48070 - DNA, 26 bp, Artificial Sequence
  Probe
gagttcgagcctcacctggagcattg

SEQ ID NO: 48071 - DNA, 23 bp, Artificial Sequence
  Probe
gagttcgatcctcacacggggca

SEQ ID NO: 48072 - DNA, 25 bp, Artificial Sequence
  Probe
gagttcgatcctcacacggggcaca

SEQ ID NO: 48073 - DNA, 26 bp, Artificial Sequence
  Probe
gagttcgatcctcacacggggcacaa

SEQ ID NO: 48074 - DNA, 50 bp, Artificial Sequence; identical to SEQ ID NO: 973
  Probe

SEQ ID NO: 48075 - DNA, 20 bp, Artificial Sequence
  Probe
gataacagctatccattggt

SEQ ID NO: 48076 - DNA, 22 bp, Artificial Sequence
  Probe
gataacagctatccattggtct

SEQ ID NO: 48077 - DNA, 23 bp, Artificial Sequence
  Probe
gataacagctatccattggtctt

SEQ ID NO: 48078 - DNA, 30 bp, Artificial Sequence; identical to SEQ ID NO: 31564
  Probe

SEQ ID NO: 48079 - DNA, 32 bp, Artificial Sequence
  Probe
gataacagctatccattggtcttaggccccaa

SEQ ID NO: 48080 - DNA, 21 bp, Artificial Sequence
  Probe
gataatcatatttaccaaatg

SEQ ID NO: 48081 - DNA, 20 bp, Artificial Sequence
  Probe
gatagagtaaataataggag

SEQ ID NO: 48082 - DNA, 28 bp, Artificial Sequence
  Probe
gatagagtaaataataggagcttaaacc

SEQ ID NO: 48083 - DNA, 29 bp, Artificial Sequence
  Probe
gatagagtaaataataggagcttaaaccc

SEQ ID NO: 48084 - DNA, 30 bp, Artificial Sequence; identical to SEQ ID NO: 31570
  Probe

SEQ ID NO: 48085 - DNA, 33 bp, Artificial Sequence; identical to SEQ ID NO: 974
  Probe

SEQ ID NO: 48086 - DNA, 34 bp, Artificial Sequence; identical to SEQ ID NO: 975
  Probe

SEQ ID NO: 48087 - DNA, 35 bp, Artificial Sequence
  Probe
gatagagtaaataataggagcttaaacccccttat

SEQ ID NO: 48088 - DNA, 36 bp, Artificial Sequence
  Probe
gatagagtaaataataggagcttaaacccccttatt

SEQ ID NO: 48089 - DNA, 40 bp, Artificial Sequence; identical to SEQ ID NO: 976
  Probe

SEQ ID NO: 48090 - DNA, 41 bp, Artificial Sequence; identical to SEQ ID NO: 5711
  Probe

SEQ ID NO: 48091 - DNA, 42 bp, Artificial Sequence; identical to SEQ ID NO: 5712
  Probe

SEQ ID NO: 48092 - DNA, 43 bp, Artificial Sequence; identical to SEQ ID NO: 5713
  Probe

SEQ ID NO: 48093 - DNA, 44 bp, Artificial Sequence; identical to SEQ ID NO: 5714
  Probe

SEQ ID NO: 48094 - DNA, 45 bp, Artificial Sequence; identical to SEQ ID NO: 5715
  Probe

SEQ ID NO: 48095 - DNA, 46 bp, Artificial Sequence; identical to SEQ ID NO: 5716
  Probe

SEQ ID NO: 48096 - DNA, 16 bp, Artificial Sequence
  Probe
gataggtggcacggag

SEQ ID NO: 48097 - DNA, 25 bp, Artificial Sequence
  Probe
gatatccaaccttcagctatagggt

SEQ ID NO: 48098 - DNA, 30 bp, Artificial Sequence; identical to SEQ ID NO: 20401
  Probe

SEQ ID NO: 48099 - DNA, 17 bp, Artificial Sequence
  Probe
gatccccagcatctcca

SEQ ID NO: 48100 - DNA, 24 bp, Artificial Sequence
  Probe
gatccccagcatctccagtgtttt

SEQ ID NO: 48101 - DNA, 17 bp, Artificial Sequence
  Probe
gatccccggcatctcca

SEQ ID NO: 48102 - DNA, 19 bp, Artificial Sequence
  Probe
gatccccggcatctccatt

SEQ ID NO: 48103 - DNA, 20 bp, Artificial Sequence
  Probe
gatccccggcatctccattg

SEQ ID NO: 48104 - DNA, 20 bp, Artificial Sequence
  Probe
gatccccgtacgggccacga

SEQ ID NO: 48105 - DNA, 20 bp, Artificial Sequence
  Probe
gatcccgggtttcggcactt

SEQ ID NO: 48106 - DNA, 29 bp, Artificial Sequence
  Probe
gatccgagttcaaatctcggtggaacctg

SEQ ID NO: 48107 - DNA, 29 bp, Artificial Sequence
  Probe
gatccgagttcaaatctcggtggaacctt

SEQ ID NO: 48108 - DNA, 28 bp, Artificial Sequence
  Probe
gatccgagttcaaatctcggtgggacct

SEQ ID NO: 48109 - DNA, 31 bp, Artificial Sequence; identical to SEQ ID NO: 5720
  Probe

SEQ ID NO: 48110 - DNA, 29 bp, Artificial Sequence
  Probe
gatcctgggttcgaatcccagcggggcct

SEQ ID NO: 48111 - DNA, 32 bp, Artificial Sequence
  Probe
gatcctgggttcgaatcccagcggggccttac

SEQ ID NO: 48112 - DNA, 26 bp, Artificial Sequence
  Probe
gatcctgggttcgaatcccagcggtg

SEQ ID NO: 48113 - DNA, 27 bp, Artificial Sequence
  Probe
gatcctgggttcgaatcccagcggtgc

SEQ ID NO: 48114 - DNA, 29 bp, Artificial Sequence
  Probe
gatcctgggttcgaatcccagcggtgcct

SEQ ID NO: 48115 - DNA, 30 bp, Artificial Sequence
  Probe
gatcctgggttcgaatcccagcggtgcctc

SEQ ID NO: 48116 - DNA, 32 bp, Artificial Sequence
  Probe
gatcctgggttcgaatcccagcggtgcctcaa

SEQ ID NO: 48117 - DNA, 32 bp, Artificial Sequence; identical to SEQ ID NO: 5721
  Probe

SEQ ID NO: 48118 - DNA, 20 bp, Artificial Sequence
  Probe
gatcgaaaccatcctctgct

SEQ ID NO: 48119 - DNA, 24 bp, Artificial Sequence
  Probe
gatcgaaaccatcctctgctaggt

SEQ ID NO: 48120 - DNA, 23 bp, Artificial Sequence
  Probe
gatcgaaaccatcctctgctatc

SEQ ID NO: 48121 - DNA, 20 bp, Artificial Sequence
  Probe
gatcgatgcccgcatcctcc

SEQ ID NO: 48122 - DNA, 22 bp, Artificial Sequence
  Probe
gatcgatgcccgcatcctccac

SEQ ID NO: 48123 - DNA, 23 bp, Artificial Sequence
  Probe
gatcgatgcccgcatcctccact

SEQ ID NO: 48124 - DNA, 24 bp, Artificial Sequence
  Probe
gatcgatgcccgcatcctccactc

SEQ ID NO: 48125 - DNA, 24 bp, Artificial Sequence
  Probe
gatcgatgcccgcattctccatac

SEQ ID NO: 48126 - DNA, 26 bp, Artificial Sequence
  Probe
gatgaaaacctttttccaaggacaaa

SEQ ID NO: 48127 - DNA, 27 bp, Artificial Sequence
  Probe
gatgaaaacctttttccaaggacaaat

SEQ ID NO: 48128 - DNA, 16 bp, Artificial Sequence
  Probe
gatgcagagtggggtt

SEQ ID NO: 48129 - DNA, 18 bp, Artificial Sequence
  Probe
gatgcagagtggggtttt

SEQ ID NO: 48130 - DNA, 19 bp, Artificial Sequence
  Probe
gatgcagagtggggttttg

SEQ ID NO: 48131 - DNA, 23 bp, Artificial Sequence
  Probe
gatgcagagtggggttttgcagt

SEQ ID NO: 48132 - DNA, 25 bp, Artificial Sequence
  Probe
gatgcagagtggggttttgcagtcc

SEQ ID NO: 48133 - DNA, 26 bp, Artificial Sequence
  Probe
gatgcagagtggggttttgcagtcct

SEQ ID NO: 48134 - DNA, 28 bp, Artificial Sequence
  Probe
gatgcagagtggggttttgcagtcctta

SEQ ID NO: 48135 - DNA, 29 bp, Artificial Sequence
  Probe
gatgcagagtggggttttgcagtccttag

SEQ ID NO: 48136 - DNA, 30 bp, Artificial Sequence; identical to SEQ ID NO: 5730
  Probe

SEQ ID NO: 48137 - DNA, 31 bp, Artificial Sequence; identical to SEQ ID NO: 5731
  Probe

SEQ ID NO: 48138 - DNA, 17 bp, Artificial Sequence
  Probe
gatgcccgcatcctcca

SEQ ID NO: 48139 - DNA, 25 bp, Artificial Sequence
  Probe
gatggggtgtgataggtggcacgga

SEQ ID NO: 48140 - DNA, 27 bp, Artificial Sequence
  Probe
gatggggtgtgataggtggcacggaga

SEQ ID NO: 48141 - DNA, 28 bp, Artificial Sequence
  Probe
gatgggttcgattctcatagtcctagaa

SEQ ID NO: 48142 - DNA, 31 bp, Artificial Sequence; identical to SEQ ID NO: 5736
  Probe

SEQ ID NO: 48143 - DNA, 33 bp, Artificial Sequence; identical to SEQ ID NO: 5738
  Probe

SEQ ID NO: 48144 - DNA, 34 bp, Artificial Sequence; identical to SEQ ID NO: 5739
  Probe

SEQ ID NO: 48145 - DNA, 25 bp, Artificial Sequence
  Probe
gattagggtgcttagctgttaacta

SEQ ID NO: 48146 - DNA, 50 bp, Artificial Sequence; identical to SEQ ID NO: 977
  Probe

SEQ ID NO: 48147 - DNA, 27 bp, Artificial Sequence
  Probe
gattccaggttcgactcctggctggct

SEQ ID NO: 48148 - DNA, 46 bp, Artificial Sequence; identical to SEQ ID NO: 20434
  Probe

SEQ ID NO: 48149 - DNA, 18 bp, Artificial Sequence
  Probe
gattccccgacggggaga

SEQ ID NO: 48150 - DNA, 18 bp, Artificial Sequence
  Probe
gattccccgacggggagg

SEQ ID NO: 48151 - DNA, 20 bp, Artificial Sequence
  Probe
gattccccgacggggaggca

SEQ ID NO: 48152 - DNA, 20 bp, Artificial Sequence
  Probe
gattcccgggcggcgcactt

SEQ ID NO: 48153 - DNA, 18 bp, Artificial Sequence
  Probe
gattctcatagtcctaga

SEQ ID NO: 48154 - DNA, 16 bp, Artificial Sequence
  Probe
gattgtgaatctgaca

SEQ ID NO: 48155 - DNA, 18 bp, Artificial Sequence
  Probe
gattgtgaatctgacaac

SEQ ID NO: 48156 - DNA, 19 bp, Artificial Sequence
  Probe
gattgtgaatctgacaaca

SEQ ID NO: 48157 - DNA, 21 bp, Artificial Sequence
  Probe
gattgtgaatctgacaacaga

SEQ ID NO: 48158 - DNA, 22 bp, Artificial Sequence
  Probe
gattgtgaatctgacaacagag

SEQ ID NO: 48159 - DNA, 24 bp, Artificial Sequence
  Probe
gattgtgaatctgacaacagaggc

SEQ ID NO: 48160 - DNA, 25 bp, Artificial Sequence
  Probe
gattgtgaatctgacaacagaggct

SEQ ID NO: 48161 - DNA, 31 bp, Artificial Sequence
  Probe
gattgtgaatctgacaacagaggcttacgac

SEQ ID NO: 48162 - DNA, 35 bp, Artificial Sequence; identical to SEQ ID NO: 5752
  Probe

SEQ ID NO: 48163 - DNA, 36 bp, Artificial Sequence; identical to SEQ ID NO: 5753
  Probe

SEQ ID NO: 48164 - DNA, 38 bp, Artificial Sequence; identical to SEQ ID NO: 985
  Probe

SEQ ID NO: 48165 - DNA, 40 bp, Artificial Sequence; identical to SEQ ID NO: 20460
  Probe

SEQ ID NO: 48166 - DNA, 44 bp, Artificial Sequence; identical to SEQ ID NO: 5755
  Probe

SEQ ID NO: 48167 - DNA, 45 bp, Artificial Sequence; identical to SEQ ID NO: 5756
  Probe

SEQ ID NO: 48168 - DNA, 46 bp, Artificial Sequence; identical to SEQ ID NO: 5757
  Probe

SEQ ID NO: 48169 - DNA, 48 bp, Artificial Sequence
  Probe
gattgtgaatctgacaacagaggcttacgaccccttatttaccgagaa

SEQ ID NO: 48170 - DNA, 49 bp, Artificial Sequence
  Probe
gattgtgaatctgacaacagaggcttacgaccccttatttaccgagaaa

SEQ ID NO: 48171 - DNA, 50 bp, Artificial Sequence; identical to SEQ ID NO: 5758
  Probe

SEQ ID NO: 48172 - DNA, 27 bp, Artificial Sequence
  Probe
gattgtgggttcgagtcccatctgggg

SEQ ID NO: 48173 - DNA, 20 bp, Artificial Sequence
  Probe
gatttcaacttaacttgacc

SEQ ID NO: 48174 - DNA, 23 bp, Artificial Sequence
  Probe
gatttcaacttaacttgaccgct

SEQ ID NO: 48175 - DNA, 24 bp, Artificial Sequence
  Probe
gatttcaacttaacttgaccgctc

SEQ ID NO: 48176 - DNA, 25 bp, Artificial Sequence
  Probe
gatttcaacttaacttgaccgctct

SEQ ID NO: 48177 - DNA, 27 bp, Artificial Sequence
  Probe
gatttcaacttaacttgaccgctctga

SEQ ID NO: 48178 - DNA, 28 bp, Artificial Sequence
  Probe
gatttcaacttaacttgaccgctctgag

SEQ ID NO: 48179 - DNA, 29 bp, Artificial Sequence
  Probe
gatttcaacttaacttgaccgctctgagc

SEQ ID NO: 48180 - DNA, 30 bp, Artificial Sequence; identical to SEQ ID NO: 5769
  Probe

SEQ ID NO: 48181 - DNA, 25 bp, Artificial Sequence
  Probe
gatttcgactcattaaattatgata

SEQ ID NO: 48182 - DNA, 31 bp, Artificial Sequence; identical to SEQ ID NO: 5771
  Probe

SEQ ID NO: 48183 - DNA, 37 bp, Artificial Sequence
  Probe
gatttcgactcattaaattatgataatcatatttacc

SEQ ID NO: 48184 - DNA, 40 bp, Artificial Sequence; identical to SEQ ID NO: 5773
  Probe

SEQ ID NO: 48185 - DNA, 42 bp, Artificial Sequence; identical to SEQ ID NO: 5774
  Probe

SEQ ID NO: 48186 - DNA, 46 bp, Artificial Sequence
  Probe
gatttgcgttcagttgatgcagagtggggttttgcagtccttagct

SEQ ID NO: 48187 - DNA, 20 bp, Artificial Sequence
  Probe
gattttcatattgaattgca

SEQ ID NO: 48188 - DNA, 50 bp, Artificial Sequence
  Probe
gattttcatattgaattgcaaattcgaagaagcagcttcaaacctgccgg

SEQ ID NO: 48189 - DNA, 27 bp, Artificial Sequence
  Probe
gcaaattcgaagaagcagcttcaaacc

SEQ ID NO: 48190 - DNA, 35 bp, Artificial Sequence
  Probe
gcaaattcgaagaagcagcttcaaacctgccgggg

SEQ ID NO: 48191 - DNA, 36 bp, Artificial Sequence; identical to SEQ ID NO: 31656
  Probe

SEQ ID NO: 48192 - DNA, 37 bp, Artificial Sequence; identical to SEQ ID NO: 5780
  Probe

SEQ ID NO: 48193 - DNA, 39 bp, Artificial Sequence; identical to SEQ ID NO: 5781
  Probe

SEQ ID NO: 48194 - DNA, 40 bp, Artificial Sequence; identical to SEQ ID NO: 5782
  Probe

SEQ ID NO: 48195 - DNA, 41 bp, Artificial Sequence; identical to SEQ ID NO: 5783
  Probe

SEQ ID NO: 48196 - DNA, 28 bp, Artificial Sequence
  Probe
gcaacctcggttcgaatccgagtcacgg

SEQ ID NO: 48197 - DNA, 30 bp, Artificial Sequence
  Probe
gcaacctcggttcgaatccgagtcacggca

SEQ ID NO: 48198 - DNA, 32 bp, Artificial Sequence; identical to SEQ ID NO: 5784
  Probe

SEQ ID NO: 48199 - DNA, 32 bp, Artificial Sequence; identical to SEQ ID NO: 5785
  Probe

SEQ ID NO: 48200 - DNA, 33 bp, Artificial Sequence; identical to SEQ ID NO: 5786
  Probe

SEQ ID NO: 48201 - DNA, 32 bp, Artificial Sequence; identical to SEQ ID NO: 5787
  Probe

SEQ ID NO: 48202 - DNA, 33 bp, Artificial Sequence; identical to SEQ ID NO: 5788
  Probe

SEQ ID NO: 48203 - DNA, 49 bp, Artificial Sequence; identical to SEQ ID NO: 5792
  Probe

SEQ ID NO: 48204 - DNA, 50 bp, Artificial Sequence; identical to SEQ ID NO: 5793
  Probe

SEQ ID NO: 48205 - DNA, 27 bp, Artificial Sequence
  Probe
gcaatggtggttcagtggtagaattct

SEQ ID NO: 48206 - DNA, 31 bp, Artificial Sequence; identical to SEQ ID NO: 5794
  Probe

SEQ ID NO: 48207 - DNA, 32 bp, Artificial Sequence; identical to SEQ ID NO: 5795
  Probe

SEQ ID NO: 48208 - DNA, 22 bp, Artificial Sequence
  Probe
gcacactactataaccacccta

SEQ ID NO: 48209 - DNA, 25 bp, Artificial Sequence
  Probe
gcacaggttcgaatcctgttcgtga

SEQ ID NO: 48210 - DNA, 27 bp, Artificial Sequence
  Probe
gcacaggttcgaatcctgttcgtgacg

SEQ ID NO: 48211 - DNA, 16 bp, Artificial Sequence
  Probe
gcacccaacttacact

SEQ ID NO: 48212 - DNA, 17 bp, Artificial Sequence
  Probe
gcacccaacttacactt

SEQ ID NO: 48213 - DNA, 18 bp, Artificial Sequence
  Probe
gcacccaacttacactta

SEQ ID NO: 48214 - DNA, 19 bp, Artificial Sequence
  Probe
gcacccaacttacacttag

SEQ ID NO: 48215 - DNA, 20 bp, Artificial Sequence
  Probe
gcacccaacttacacttagg

SEQ ID NO: 48216 - DNA, 21 bp, Artificial Sequence
  Probe
gcacccaacttacacttagga

SEQ ID NO: 48217 - DNA, 22 bp, Artificial Sequence
  Probe
gcacccaacttacacttaggag

SEQ ID NO: 48218 - DNA, 23 bp, Artificial Sequence
  Probe
gcacccaacttacacttaggaga

SEQ ID NO: 48219 - DNA, 24 bp, Artificial Sequence
  Probe
gcacccaacttacacttaggagat

SEQ ID NO: 48220 - DNA, 25 bp, Artificial Sequence
  Probe
gcacccaacttacacttaggagatt

SEQ ID NO: 48221 - DNA, 26 bp, Artificial Sequence
  Probe
gcacccaacttacacttaggagattt

SEQ ID NO: 48222 - DNA, 27 bp, Artificial Sequence
  Probe
gcacccaacttacacttaggagatttc

SEQ ID NO: 48223 - DNA, 28 bp, Artificial Sequence
  Probe
gcacccaacttacacttaggagatttca

SEQ ID NO: 48224 - DNA, 29 bp, Artificial Sequence
  Probe
gcacccaacttacacttaggagatttcaa

SEQ ID NO: 48225 - DNA, 30 bp, Artificial Sequence; identical to SEQ ID NO: 5807
  Probe

SEQ ID NO: 48226 - DNA, 31 bp, Artificial Sequence; identical to SEQ ID NO: 5808
  Probe

SEQ ID NO: 48227 - DNA, 32 bp, Artificial Sequence; identical to SEQ ID NO: 5809
  Probe

SEQ ID NO: 48228 - DNA, 33 bp, Artificial Sequence; identical to SEQ ID NO: 5810
  Probe

SEQ ID NO: 48229 - DNA, 36 bp, Artificial Sequence; identical to SEQ ID NO: 20519
  Probe

SEQ ID NO: 48230 - DNA, 37 bp, Artificial Sequence; identical to SEQ ID NO: 5812
  Probe

SEQ ID NO: 48231 - DNA, 38 bp, Artificial Sequence
  Probe
gcacccaacttacacttaggagatttcaacttaacttg

SEQ ID NO: 48232 - DNA, 39 bp, Artificial Sequence
  Probe
gcacccaacttacacttaggagatttcaacttaacttga

SEQ ID NO: 48233 - DNA, 40 bp, Artificial Sequence; identical to SEQ ID NO: 20520
  Probe

SEQ ID NO: 48234 - DNA, 41 bp, Artificial Sequence
  Probe
gcacccaacttacacttaggagatttcaacttaacttgacc

SEQ ID NO: 48235 - DNA, 42 bp, Artificial Sequence; identical to SEQ ID NO: 5813
  Probe

SEQ ID NO: 48236 - DNA, 43 bp, Artificial Sequence; identical to SEQ ID NO: 5814
  Probe

SEQ ID NO: 48237 - DNA, 44 bp, Artificial Sequence; identical to SEQ ID NO: 5815
  Probe

SEQ ID NO: 48238 - DNA, 45 bp, Artificial Sequence; identical to SEQ ID NO: 5816
  Probe

SEQ ID NO: 48239 - DNA, 46 bp, Artificial Sequence; identical to SEQ ID NO: 5817
  Probe

SEQ ID NO: 48240 - DNA, 49 bp, Artificial Sequence; identical to SEQ ID NO: 5819
  Probe

SEQ ID NO: 48241 - DNA, 50 bp, Artificial Sequence; identical to SEQ ID NO: 5820
  Probe

SEQ ID NO: 48242 - DNA, 18 bp, Artificial Sequence
  Probe
gcacgaggccccgggttc

SEQ ID NO: 48243 - DNA, 35 bp, Artificial Sequence; identical to SEQ ID NO: 13433
  Probe

SEQ ID NO: 48244 - DNA, 37 bp, Artificial Sequence; identical to SEQ ID NO: 20530
  Probe

SEQ ID NO: 48245 - DNA, 38 bp, Artificial Sequence; identical to SEQ ID NO: 5821
  Probe

SEQ ID NO: 48246 - DNA, 38 bp, Artificial Sequence; identical to SEQ ID NO: 20534
  Probe

SEQ ID NO: 48247 - DNA, 38 bp, Artificial Sequence; identical to SEQ ID NO: 20539
  Probe

SEQ ID NO: 48248 - DNA, 28 bp, Artificial Sequence
  Probe
gcacgcgtgggttcgaatcccatcctcg

SEQ ID NO: 48249 - DNA, 29 bp, Artificial Sequence
  Probe
gcacgcgtgggttcgaatcccatcctcgt

SEQ ID NO: 48250 - DNA, 30 bp, Artificial Sequence
  Probe
gcacgcgtgggttcgaatcccatcctcgtc

SEQ ID NO: 48251 - DNA, 31 bp, Artificial Sequence
  Probe
gcacgcgtgggttcgaatcccatcctcgtcg

SEQ ID NO: 48252 - DNA, 28 bp, Artificial Sequence
  Probe
gcacggagaattttggattctcagggat

SEQ ID NO: 48253 - DNA, 29 bp, Artificial Sequence
  Probe
gcacggagaattttggattctcagggatg

SEQ ID NO: 48254 - DNA, 35 bp, Artificial Sequence
  Probe
gcacggagaattttggattctcagggatgggttcg

SEQ ID NO: 48255 - DNA, 50 bp, Artificial Sequence
  Probe
gcacggagaattttggattctcagggatgggttcgattctcatagtccta

SEQ ID NO: 48256 - DNA, 41 bp, Artificial Sequence
  Probe
gcacgtatgaggccccgggttcaatccccggcatctccaga

SEQ ID NO: 48257 - DNA, 42 bp, Artificial Sequence; identical to SEQ ID NO: 20546
  Probe

SEQ ID NO: 48258 - DNA, 28 bp, Artificial Sequence
  Probe
gcactctggactctgaatccagcgatcc

SEQ ID NO: 48259 - DNA, 30 bp, Artificial Sequence; identical to SEQ ID NO: 990
  Probe

SEQ ID NO: 48260 - DNA, 31 bp, Artificial Sequence; identical to SEQ ID NO: 5824
  Probe

SEQ ID NO: 48261 - DNA, 28 bp, Artificial Sequence
  Probe
gcactctggactttgaatccagcgatcc

SEQ ID NO: 48262 - DNA, 31 bp, Artificial Sequence; identical to SEQ ID NO: 20555
  Probe

SEQ ID NO: 48263 - DNA, 29 bp, Artificial Sequence
  Probe
gcactggtggttcagtggtagaattctcg

SEQ ID NO: 48264 - DNA, 30 bp, Artificial Sequence; identical to SEQ ID NO: 8615
  Probe

SEQ ID NO: 48265 - DNA, 33 bp, Artificial Sequence; identical to SEQ ID NO: 5828
  Probe

SEQ ID NO: 48266 - DNA, 34 bp, Artificial Sequence; identical to SEQ ID NO: 5829
  Probe

SEQ ID NO: 48267 - DNA, 35 bp, Artificial Sequence; identical to SEQ ID NO: 20565
  Probe

SEQ ID NO: 48268 - DNA, 33 bp, Artificial Sequence; identical to SEQ ID NO: 13439
  Probe

SEQ ID NO: 48269 - DNA, 34 bp, Artificial Sequence; identical to SEQ ID NO: 13440
  Probe

SEQ ID NO: 48270 - DNA, 36 bp, Artificial Sequence; identical to SEQ ID NO: 993
  Probe

SEQ ID NO: 48271 - DNA, 37 bp, Artificial Sequence; identical to SEQ ID NO: 5830
  Probe

SEQ ID NO: 48272 - DNA, 38 bp, Artificial Sequence; identical to SEQ ID NO: 5831
  Probe

SEQ ID NO: 48273 - DNA, 38 bp, Artificial Sequence; identical to SEQ ID NO: 5832
  Probe

SEQ ID NO: 48274 - DNA, 16 bp, Artificial Sequence
  Probe
gcagagcccggtaatc

SEQ ID NO: 48275 - DNA, 19 bp, Artificial Sequence
  Probe
gcagagcccggtaatcgca

SEQ ID NO: 48276 - DNA, 22 bp, Artificial Sequence
  Probe
gcagagcccggtaatcgcataa

SEQ ID NO: 48277 - DNA, 42 bp, Artificial Sequence
  Probe
gcagagcccggtaatcgcataaaacttaaaactttacagtca

SEQ ID NO: 48278 - DNA, 44 bp, Artificial Sequence
  Probe
gcagagcccggtaatcgcataaaacttaaaactttacagtcaga

SEQ ID NO: 48279 - DNA, 16 bp, Artificial Sequence
  Probe
gcagagtggggttttg

SEQ ID NO: 48280 - DNA, 26 bp, Artificial Sequence
  Probe
gcagagtggggttttgcagtccttag

SEQ ID NO: 48281 - DNA, 27 bp, Artificial Sequence
  Probe
gcagagtggggttttgcagtccttagc

SEQ ID NO: 48282 - DNA, 28 bp, Artificial Sequence
  Probe
gcagagtggggttttgcagtccttagct

SEQ ID NO: 48283 - DNA, 31 bp, Artificial Sequence; identical to SEQ ID NO: 5838
  Probe

SEQ ID NO: 48284 - DNA, 32 bp, Artificial Sequence; identical to SEQ ID NO: 20582
  Probe

SEQ ID NO: 48285 - DNA, 33 bp, Artificial Sequence; identical to SEQ ID NO: 20583
  Probe

SEQ ID NO: 48286 - DNA, 35 bp, Artificial Sequence
  Probe
gcagcaacctcggttcgaatccgagtcacggcaaa

SEQ ID NO: 48287 - DNA, 35 bp, Artificial Sequence
  Probe
gcagcaacctcggttcgaatccgagtcacggcagg

SEQ ID NO: 48288 - DNA, 36 bp, Artificial Sequence; identical to SEQ ID NO: 5839
  Probe

SEQ ID NO: 48289 - DNA, 35 bp, Artificial Sequence
  Probe
gcagcaacctcggttcgaatccgagtcacggcatt

SEQ ID NO: 48290 - DNA, 36 bp, Artificial Sequence; identical to SEQ ID NO: 5840
  Probe

SEQ ID NO: 48291 - DNA, 33 bp, Artificial Sequence; identical to SEQ ID NO: 20612
  Probe

SEQ ID NO: 48292 - DNA, 25 bp, Artificial Sequence
  Probe
gcataaaacttaaaactttacagtc

SEQ ID NO: 48293 - DNA, 28 bp, Artificial Sequence
  Probe
gcataaaacttaaaactttacagtcaga

SEQ ID NO: 48294 - DNA, 29 bp, Artificial Sequence
  Probe
gcataaaacttaaaactttacagtcagag

SEQ ID NO: 48295 - DNA, 33 bp, Artificial Sequence; identical to SEQ ID NO: 5847
  Probe

SEQ ID NO: 48296 - DNA, 34 bp, Artificial Sequence
  Probe
gcataaaacttaaaactttacagtcagaggttca

SEQ ID NO: 48297 - DNA, 50 bp, Artificial Sequence; identical to SEQ ID NO: 5851
  Probe

SEQ ID NO: 48298 - DNA, 28 bp, Artificial Sequence
  Probe
gcatagctgccttccaagcagttgaccc

SEQ ID NO: 48299 - DNA, 50 bp, Artificial Sequence
  Probe
gcatagctgccttccaagcagttgacccgggttcgattcccggccaacgc

SEQ ID NO: 48300 - DNA, 27 bp, Artificial Sequence
  Probe
gcataggtggttcagtggtagaattct

SEQ ID NO: 48301 - DNA, 29 bp, Artificial Sequence
  Probe
gcataggtggttcagtggtagaattcttg

SEQ ID NO: 48302 - DNA, 30 bp, Artificial Sequence; identical to SEQ ID NO: 10307
  Probe

SEQ ID NO: 48303 - DNA, 31 bp, Artificial Sequence; identical to SEQ ID NO: 5857
  Probe

SEQ ID NO: 48304 - DNA, 32 bp, Artificial Sequence; identical to SEQ ID NO: 5858
  Probe

SEQ ID NO: 48305 - DNA, 33 bp, Artificial Sequence; identical to SEQ ID NO: 5859
  Probe

SEQ ID NO: 48306 - DNA, 34 bp, Artificial Sequence; identical to SEQ ID NO: 20629
  Probe

SEQ ID NO: 48307 - DNA, 35 bp, Artificial Sequence; identical to SEQ ID NO: 20630
  Probe

SEQ ID NO: 48308 - DNA, 35 bp, Artificial Sequence; identical to SEQ ID NO: 13456
  Probe

SEQ ID NO: 48309 - DNA, 38 bp, Artificial Sequence; identical to SEQ ID NO: 5861
  Probe

SEQ ID NO: 48310 - DNA, 27 bp, Artificial Sequence
  Probe
gcatgggtgattcagtggtagaatttt

SEQ ID NO: 48311 - DNA, 16 bp, Artificial Sequence
  Probe
gcatgggtggttcagt

SEQ ID NO: 48312 - DNA, 18 bp, Artificial Sequence
  Probe
gcatgggtggttcagtgg

SEQ ID NO: 48313 - DNA, 19 bp, Artificial Sequence
  Probe
gcatgggtggttcagtggt

SEQ ID NO: 48314 - DNA, 20 bp, Artificial Sequence
  Probe
gcatgggtggttcagtggta

SEQ ID NO: 48315 - DNA, 21 bp, Artificial Sequence
  Probe
gcatgggtggttcagtggtag

SEQ ID NO: 48316 - DNA, 22 bp, Artificial Sequence
  Probe
gcatgggtggttcagtggtaga

SEQ ID NO: 48317 - DNA, 23 bp, Artificial Sequence
  Probe
gcatgggtggttcagtggtagaa

SEQ ID NO: 48318 - DNA, 24 bp, Artificial Sequence
  Probe
gcatgggtggttcagtggtagaat

SEQ ID NO: 48319 - DNA, 25 bp, Artificial Sequence
  Probe
gcatgggtggttcagtggtagaatt

SEQ ID NO: 48320 - DNA, 26 bp, Artificial Sequence
  Probe
gcatgggtggttcagtggtagaattc

SEQ ID NO: 48321 - DNA, 27 bp, Artificial Sequence
  Probe
gcatgggtggttcagtggtagaattct

SEQ ID NO: 48322 - DNA, 36 bp, Artificial Sequence; identical to SEQ ID NO: 1008
  Probe

SEQ ID NO: 48323 - DNA, 38 bp, Artificial Sequence; identical to SEQ ID NO: 1009
  Probe

SEQ ID NO: 48324 - DNA, 40 bp, Artificial Sequence; identical to SEQ ID NO: 5872
  Probe

SEQ ID NO: 48325 - DNA, 49 bp, Artificial Sequence; identical to SEQ ID NO: 5876
  Probe

SEQ ID NO: 48326 - DNA, 25 bp, Artificial Sequence
  Probe
gcattaaccttttaagttaaagatt

SEQ ID NO: 48327 - DNA, 26 bp, Artificial Sequence
  Probe
gcattaaccttttaagttaaagatta

SEQ ID NO: 48328 - DNA, 30 bp, Artificial Sequence; identical to SEQ ID NO: 20658
  Probe

SEQ ID NO: 48329 - DNA, 31 bp, Artificial Sequence; identical to SEQ ID NO: 20659
  Probe

SEQ ID NO: 48330 - DNA, 32 bp, Artificial Sequence; identical to SEQ ID NO: 20660
  Probe

SEQ ID NO: 48331 - DNA, 33 bp, Artificial Sequence; identical to SEQ ID NO: 5879
  Probe

SEQ ID NO: 48332 - DNA, 35 bp, Artificial Sequence; identical to SEQ ID NO: 13475
  Probe

SEQ ID NO: 48333 - DNA, 40 bp, Artificial Sequence; identical to SEQ ID NO: 5880
  Probe

SEQ ID NO: 48334 - DNA, 49 bp, Artificial Sequence; identical to SEQ ID NO: 5881
  Probe

SEQ ID NO: 48335 - DNA, 50 bp, Artificial Sequence; identical to SEQ ID NO: 5882
  Probe

SEQ ID NO: 48336 - DNA, 27 bp, Artificial Sequence
  Probe
gcattggtggttcaatggtagaattct

SEQ ID NO: 48337 - DNA, 30 bp, Artificial Sequence; identical to SEQ ID NO: 10328
  Probe

SEQ ID NO: 48338 - DNA, 33 bp, Artificial Sequence; identical to SEQ ID NO: 5885
  Probe

SEQ ID NO: 48339 - DNA, 34 bp, Artificial Sequence; identical to SEQ ID NO: 20670
  Probe

SEQ ID NO: 48340 - DNA, 35 bp, Artificial Sequence; identical to SEQ ID NO: 20671
  Probe

SEQ ID NO: 48341 - DNA, 16 bp, Artificial Sequence
  Probe
gcattggtggttcagt

SEQ ID NO: 48342 - DNA, 17 bp, Artificial Sequence
  Probe
gcattggtggttcagtg

SEQ ID NO: 48343 - DNA, 18 bp, Artificial Sequence
  Probe
gcattggtggttcagtgg

SEQ ID NO: 48344 - DNA, 19 bp, Artificial Sequence
  Probe
gcattggtggttcagtggt

SEQ ID NO: 48345 - DNA, 20 bp, Artificial Sequence
  Probe
gcattggtggttcagtggta

SEQ ID NO: 48346 - DNA, 21 bp, Artificial Sequence
  Probe
gcattggtggttcagtggtag

SEQ ID NO: 48347 - DNA, 22 bp, Artificial Sequence
  Probe
gcattggtggttcagtggtaga

SEQ ID NO: 48348 - DNA, 23 bp, Artificial Sequence
  Probe
gcattggtggttcagtggtagaa

SEQ ID NO: 48349 - DNA, 24 bp, Artificial Sequence
  Probe
gcattggtggttcagtggtagaat

SEQ ID NO: 48350 - DNA, 25 bp, Artificial Sequence
  Probe
gcattggtggttcagtggtagaatt

SEQ ID NO: 48351 - DNA, 26 bp, Artificial Sequence
  Probe
gcattggtggttcagtggtagaattc

SEQ ID NO: 48352 - DNA, 27 bp, Artificial Sequence
  Probe
gcattggtggttcagtggtagaattct

SEQ ID NO: 48353 - DNA, 28 bp, Artificial Sequence
  Probe
gcattggtggttcagtggtagaattctc

SEQ ID NO: 48354 - DNA, 29 bp, Artificial Sequence
  Probe
gcattggtggttcagtggtagaattctcg

SEQ ID NO: 48355 - DNA, 30 bp, Artificial Sequence; identical to SEQ ID NO: 5900
  Probe

SEQ ID NO: 48356 - DNA, 31 bp, Artificial Sequence; identical to SEQ ID NO: 5901
  Probe

SEQ ID NO: 48357 - DNA, 32 bp, Artificial Sequence; identical to SEQ ID NO: 5902
  Probe

SEQ ID NO: 48358 - DNA, 33 bp, Artificial Sequence; identical to SEQ ID NO: 5903
  Probe

SEQ ID NO: 48359 - DNA, 34 bp, Artificial Sequence; identical to SEQ ID NO: 5904
  Probe

SEQ ID NO: 48360 - DNA, 35 bp, Artificial Sequence; identical to SEQ ID NO: 5905
  Probe

SEQ ID NO: 48361 - DNA, 36 bp, Artificial Sequence; identical to SEQ ID NO: 5906
  Probe

SEQ ID NO: 48362 - DNA, 33 bp, Artificial Sequence; identical to SEQ ID NO: 5908
  Probe

SEQ ID NO: 48363 - DNA, 34 bp, Artificial Sequence; identical to SEQ ID NO: 5909
  Probe

SEQ ID NO: 48364 - DNA, 35 bp, Artificial Sequence; identical to SEQ ID NO: 5910
  Probe

SEQ ID NO: 48365 - DNA, 36 bp, Artificial Sequence; identical to SEQ ID NO: 5911
  Probe

SEQ ID NO: 48366 - DNA, 37 bp, Artificial Sequence; identical to SEQ ID NO: 5912
  Probe

SEQ ID NO: 48367 - DNA, 38 bp, Artificial Sequence; identical to SEQ ID NO: 1014
  Probe

SEQ ID NO: 48368 - DNA, 39 bp, Artificial Sequence; identical to SEQ ID NO: 1015
  Probe

SEQ ID NO: 48369 - DNA, 41 bp, Artificial Sequence; identical to SEQ ID NO: 1017
  Probe

SEQ ID NO: 48370 - DNA, 43 bp, Artificial Sequence; identical to SEQ ID NO: 5914
  Probe

SEQ ID NO: 48371 - DNA, 44 bp, Artificial Sequence; identical to SEQ ID NO: 1018
  Probe

SEQ ID NO: 48372 - DNA, 45 bp, Artificial Sequence; identical to SEQ ID NO: 5915
  Probe

SEQ ID NO: 48373 - DNA, 46 bp, Artificial Sequence; identical to SEQ ID NO: 5916
  Probe

SEQ ID NO: 48374 - DNA, 47 bp, Artificial Sequence; identical to SEQ ID NO: 5917
  Probe

SEQ ID NO: 48375 - DNA, 48 bp, Artificial Sequence; identical to SEQ ID NO: 5918
  Probe

SEQ ID NO: 48376 - DNA, 49 bp, Artificial Sequence; identical to SEQ ID NO: 1019
  Probe

SEQ ID NO: 48377 - DNA, 37 bp, Artificial Sequence; identical to SEQ ID NO: 5919
  Probe

SEQ ID NO: 48378 - DNA, 38 bp, Artificial Sequence; identical to SEQ ID NO: 20705
  Probe

SEQ ID NO: 48379 - DNA, 48 bp, Artificial Sequence
  Probe
gcattggtggttcagtggtagaattctcgcctgccatgcgggcggccg

SEQ ID NO: 48380 - DNA, 49 bp, Artificial Sequence
  Probe
gcattggtggttcagtggtagaattctcgcctgccatgcgggcggccgg

SEQ ID NO: 48381 - DNA, 50 bp, Artificial Sequence; identical to SEQ ID NO: 5921
  Probe

SEQ ID NO: 48382 - DNA, 19 bp, Artificial Sequence
  Probe
gccaacctcctactcctca

SEQ ID NO: 48383 - DNA, 31 bp, Artificial Sequence
  Probe
gccaaggtcgcgggttcgatccccgtacggg

SEQ ID NO: 48384 - DNA, 32 bp, Artificial Sequence; identical to SEQ ID NO: 20712
  Probe

SEQ ID NO: 48385 - DNA, 37 bp, Artificial Sequence; identical to SEQ ID NO: 5922
  Probe

SEQ ID NO: 48386 - DNA, 37 bp, Artificial Sequence; identical to SEQ ID NO: 5923
  Probe

SEQ ID NO: 48387 - DNA, 26 bp, Artificial Sequence
  Probe
gccacacctcagaaggtctcactttt

SEQ ID NO: 48388 - DNA, 20 bp, Artificial Sequence
  Probe
gccacgcgggaggcccgggt

SEQ ID NO: 48389 - DNA, 39 bp, Artificial Sequence; identical to SEQ ID NO: 5925
  Probe

SEQ ID NO: 48390 - DNA, 42 bp, Artificial Sequence
  Probe
gccacgcgggaggcccgggttcgattcccggccaatgcaagt

SEQ ID NO: 48391 - DNA, 42 bp, Artificial Sequence; identical to SEQ ID NO: 5926
  Probe

SEQ ID NO: 48392 - DNA, 44 bp, Artificial Sequence
  Probe
gccacgcgggaggcccgggttcgattcccggccaatgcacgagt

SEQ ID NO: 48393 - DNA, 42 bp, Artificial Sequence; identical to SEQ ID NO: 20722
  Probe

SEQ ID NO: 48394 - DNA, 42 bp, Artificial Sequence; identical to SEQ ID NO: 5929
  Probe

SEQ ID NO: 48395 - DNA, 33 bp, Artificial Sequence; identical to SEQ ID NO: 20734
  Probe

SEQ ID NO: 48396 - DNA, 34 bp, Artificial Sequence
  Probe
gccagggattgtgggttcgagtcccatctggggt

SEQ ID NO: 48397 - DNA, 36 bp, Artificial Sequence; identical to SEQ ID NO: 31799
  Probe

SEQ ID NO: 48398 - DNA, 38 bp, Artificial Sequence; identical to SEQ ID NO: 5932
  Probe

SEQ ID NO: 48399 - DNA, 16 bp, Artificial Sequence
  Probe
gcccacccagggacgc

SEQ ID NO: 48400 - DNA, 17 bp, Artificial Sequence
  Probe
gcccacccagggacgcc

SEQ ID NO: 48401 - DNA, 31 bp, Artificial Sequence; identical to SEQ ID NO: 20745
  Probe

SEQ ID NO: 48402 - DNA, 32 bp, Artificial Sequence; identical to SEQ ID NO: 5934
  Probe

SEQ ID NO: 48403 - DNA, 33 bp, Artificial Sequence; identical to SEQ ID NO: 5935
  Probe

SEQ ID NO: 48404 - DNA, 34 bp, Artificial Sequence; identical to SEQ ID NO: 20748
  Probe

SEQ ID NO: 48405 - DNA, 31 bp, Artificial Sequence; identical to SEQ ID NO: 5936
  Probe

SEQ ID NO: 48406 - DNA, 32 bp, Artificial Sequence; identical to SEQ ID NO: 5937
  Probe

SEQ ID NO: 48407 - DNA, 33 bp, Artificial Sequence; identical to SEQ ID NO: 5938
  Probe

SEQ ID NO: 48408 - DNA, 34 bp, Artificial Sequence; identical to SEQ ID NO: 5939
  Probe

SEQ ID NO: 48409 - DNA, 36 bp, Artificial Sequence; identical to SEQ ID NO: 5940
  Probe

SEQ ID NO: 48410 - DNA, 46 bp, Artificial Sequence; identical to SEQ ID NO: 5942
  Probe

SEQ ID NO: 48411 - DNA, 29 bp, Artificial Sequence
  Probe
gcccataccccgaaaatgttggttatacc

SEQ ID NO: 48412 - DNA, 36 bp, Artificial Sequence; identical to SEQ ID NO: 31810
  Probe

SEQ ID NO: 48413 - DNA, 39 bp, Artificial Sequence
  Probe
gcccataccccgaaaatgttggttatacccttcccgtac

SEQ ID NO: 48414 - DNA, 40 bp, Artificial Sequence
  Probe
gcccataccccgaaaatgttggttatacccttcccgtact

SEQ ID NO: 48415 - DNA, 42 bp, Artificial Sequence
  Probe
gcccataccccgaaaatgttggttatacccttcccgtactaa

SEQ ID NO: 48416 - DNA, 43 bp, Artificial Sequence; identical to SEQ ID NO: 5948
  Probe

SEQ ID NO: 48417 - DNA, 44 bp, Artificial Sequence; identical to SEQ ID NO: 5949
  Probe

SEQ ID NO: 48418 - DNA, 50 bp, Artificial Sequence
  Probe
gcccataccccgaaaatgttggttatacccttcccgtactaattaatccc

SEQ ID NO: 48419 - DNA, 20 bp, Artificial Sequence
  Probe
gccccaaacccactccacct

SEQ ID NO: 48420 - DNA, 26 bp, Artificial Sequence
  Probe
gccccaactaaatactaccgtatggc

SEQ ID NO: 48421 - DNA, 31 bp, Artificial Sequence; identical to SEQ ID NO: 20768
  Probe

SEQ ID NO: 48422 - DNA, 33 bp, Artificial Sequence; identical to SEQ ID NO: 20769
  Probe

SEQ ID NO: 48423 - DNA, 34 bp, Artificial Sequence; identical to SEQ ID NO: 20770
  Probe

SEQ ID NO: 48424 - DNA, 16 bp, Artificial Sequence
  Probe
gcccccatgtctaaca

SEQ ID NO: 48425 - DNA, 17 bp, Artificial Sequence
  Probe
gcccccatgtctaacaa

SEQ ID NO: 48426 - DNA, 18 bp, Artificial Sequence
  Probe
gcccccatgtctaacaac

SEQ ID NO: 48427 - DNA, 19 bp, Artificial Sequence
  Probe
gcccccatgtctaacaaca

SEQ ID NO: 48428 - DNA, 20 bp, Artificial Sequence
  Probe
gcccccatgtctaacaacat

SEQ ID NO: 48429 - DNA, 21 bp, Artificial Sequence
  Probe
gcccccatgtctaacaacatg

SEQ ID NO: 48430 - DNA, 22 bp, Artificial Sequence
  Probe
gcccccatgtctaacaacatgg

SEQ ID NO: 48431 - DNA, 23 bp, Artificial Sequence
  Probe
gcccccatgtctaacaacatggc

SEQ ID NO: 48432 - DNA, 24 bp, Artificial Sequence
  Probe
gcccccatgtctaacaacatggct

SEQ ID NO: 48433 - DNA, 25 bp, Artificial Sequence
  Probe
gcccccatgtctaacaacatggctt

SEQ ID NO: 48434 - DNA, 26 bp, Artificial Sequence
  Probe
gcccccatgtctaacaacatggcttt

SEQ ID NO: 48435 - DNA, 27 bp, Artificial Sequence
  Probe
gcccccatgtctaacaacatggctttc

SEQ ID NO: 48436 - DNA, 28 bp, Artificial Sequence
  Probe
gcccccatgtctaacaacatggctttct

SEQ ID NO: 48437 - DNA, 29 bp, Artificial Sequence
  Probe
gcccccatgtctaacaacatggctttctc

SEQ ID NO: 48438 - DNA, 30 bp, Artificial Sequence; identical to SEQ ID NO: 5966
  Probe

SEQ ID NO: 48439 - DNA, 31 bp, Artificial Sequence; identical to SEQ ID NO: 5967
  Probe

SEQ ID NO: 48440 - DNA, 32 bp, Artificial Sequence; identical to SEQ ID NO: 5968
  Probe

SEQ ID NO: 48441 - DNA, 33 bp, Artificial Sequence; identical to SEQ ID NO: 5969
  Probe

SEQ ID NO: 48442 - DNA, 34 bp, Artificial Sequence; identical to SEQ ID NO: 5970
  Probe

SEQ ID NO: 48443 - DNA, 35 bp, Artificial Sequence; identical to SEQ ID NO: 5971
  Probe

SEQ ID NO: 48444 - DNA, 36 bp, Artificial Sequence; identical to SEQ ID NO: 5972
  Probe

SEQ ID NO: 48445 - DNA, 37 bp, Artificial Sequence; identical to SEQ ID NO: 5973
  Probe

SEQ ID NO: 48446 - DNA, 25 bp, Artificial Sequence
  Probe
gccccgggttcaatccccggcacct

SEQ ID NO: 48447 - DNA, 26 bp, Artificial Sequence
  Probe
gccccgggttcaatccccggcacctc

SEQ ID NO: 48448 - DNA, 27 bp, Artificial Sequence
  Probe
gccccgggttcaatccccggcacctcc

SEQ ID NO: 48449 - DNA, 28 bp, Artificial Sequence
  Probe
gccccgggttcaatccccggcacctcca

SEQ ID NO: 48450 - DNA, 29 bp, Artificial Sequence
  Probe
gccccgggttcaatccccggcacctccag

SEQ ID NO: 48451 - DNA, 29 bp, Artificial Sequence
  Probe
gccccgggttcaatccccggcacctccat

SEQ ID NO: 48452 - DNA, 31 bp, Artificial Sequence; identical to SEQ ID NO: 20801
  Probe

SEQ ID NO: 48453 - DNA, 25 bp, Artificial Sequence
  Probe
gccccgggttcgatccccggcatct

SEQ ID NO: 48454 - DNA, 28 bp, Artificial Sequence
  Probe
gccccgggttcgatccccggcatctcca

SEQ ID NO: 48455 - DNA, 31 bp, Artificial Sequence; identical to SEQ ID NO: 5979
  Probe

SEQ ID NO: 48456 - DNA, 33 bp, Artificial Sequence
  Probe
gccccggtggcctaatggataaggcattggcct

SEQ ID NO: 48457 - DNA, 36 bp, Artificial Sequence
  Probe
gccccggtggcctaatggataaggcattggcctcct

SEQ ID NO: 48458 - DNA, 28 bp, Artificial Sequence
  Probe
gcccctcatttacataaatattatacta

SEQ ID NO: 48459 - DNA, 32 bp, Artificial Sequence
  Probe
gcccgactacctcagtcggtggagcatgggac

SEQ ID NO: 48460 - DNA, 33 bp, Artificial Sequence; identical to SEQ ID NO: 5982
  Probe

SEQ ID NO: 48461 - DNA, 31 bp, Artificial Sequence
  Probe
gcccggagagctcagtgggtagagcatcaga

SEQ ID NO: 48462 - DNA, 32 bp, Artificial Sequence
  Probe
gcccggagagctcagtgggtagagcatcagac

SEQ ID NO: 48463 - DNA, 33 bp, Artificial Sequence; identical to SEQ ID NO: 5983
  Probe

SEQ ID NO: 48464 - DNA, 16 bp, Artificial Sequence
  Probe
gcccggatagctcagt

SEQ ID NO: 48465 - DNA, 17 bp, Artificial Sequence
  Probe
gcccggatagctcagtc

SEQ ID NO: 48466 - DNA, 24 bp, Artificial Sequence
  Probe
gcccggatagctcagtcggtagag

SEQ ID NO: 48467 - DNA, 28 bp, Artificial Sequence
  Probe
gcccggatagctcagtcggtagagcatc

SEQ ID NO: 48468 - DNA, 38 bp, Artificial Sequence; identical to SEQ ID NO: 5987
  Probe

SEQ ID NO: 48469 - DNA, 39 bp, Artificial Sequence; identical to SEQ ID NO: 5988
  Probe

SEQ ID NO: 48470 - DNA, 41 bp, Artificial Sequence; identical to SEQ ID NO: 5989
  Probe

SEQ ID NO: 48471 - DNA, 49 bp, Artificial Sequence
  Probe
gcccggatagctcagtcggtagagcatcagacttttaatctgagggtcc

SEQ ID NO: 48472 - DNA, 50 bp, Artificial Sequence; identical to SEQ ID NO: 40318
  Probe

SEQ ID NO: 48473 - DNA, 31 bp, Artificial Sequence; identical to SEQ ID NO: 20818
  Probe

SEQ ID NO: 48474 - DNA, 32 bp, Artificial Sequence; identical to SEQ ID NO: 5990
  Probe

SEQ ID NO: 48475 - DNA, 33 bp, Artificial Sequence; identical to SEQ ID NO: 5991
  Probe

SEQ ID NO: 48476 - DNA, 34 bp, Artificial Sequence; identical to SEQ ID NO: 5992
  Probe

SEQ ID NO: 48477 - DNA, 19 bp, Artificial Sequence
  Probe
gcccggctagctcagtcga

SEQ ID NO: 48478 - DNA, 34 bp, Artificial Sequence; identical to SEQ ID NO: 5995
  Probe

SEQ ID NO: 48479 - DNA, 36 bp, Artificial Sequence; identical to SEQ ID NO: 5996
  Probe

SEQ ID NO: 48480 - DNA, 22 bp, Artificial Sequence
  Probe
gcccggctagctcagtcggtag

SEQ ID NO: 48481 - DNA, 24 bp, Artificial Sequence
  Probe
gcccggctagctcagtcggtagag

SEQ ID NO: 48482 - DNA, 27 bp, Artificial Sequence
  Probe
gcccggctagctcagtcggtagagcat

SEQ ID NO: 48483 - DNA, 35 bp, Artificial Sequence; identical to SEQ ID NO: 1067
  Probe

SEQ ID NO: 48484 - DNA, 36 bp, Artificial Sequence; identical to SEQ ID NO: 1068
  Probe

SEQ ID NO: 48485 - DNA, 38 bp, Artificial Sequence; identical to SEQ ID NO: 13544
  Probe

SEQ ID NO: 48486 - DNA, 39 bp, Artificial Sequence; identical to SEQ ID NO: 1075
  Probe

SEQ ID NO: 48487 - DNA, 41 bp, Artificial Sequence; identical to SEQ ID NO: 5997
  Probe

SEQ ID NO: 48488 - DNA, 45 bp, Artificial Sequence; identical to SEQ ID NO: 5998
  Probe

SEQ ID NO: 48489 - DNA, 48 bp, Artificial Sequence
  Probe
gcccggctagctcagtcggtagagcatgagactcttaatctcagggtc

SEQ ID NO: 48490 - DNA, 37 bp, Artificial Sequence; identical to SEQ ID NO: 1087
  Probe

SEQ ID NO: 48491 - DNA, 38 bp, Artificial Sequence; identical to SEQ ID NO: 6000
  Probe

SEQ ID NO: 48492 - DNA, 39 bp, Artificial Sequence; identical to SEQ ID NO: 6001
  Probe

SEQ ID NO: 48493 - DNA, 40 bp, Artificial Sequence; identical to SEQ ID NO: 1088
  Probe

SEQ ID NO: 48494 - DNA, 42 bp, Artificial Sequence; identical to SEQ ID NO: 1089
  Probe

SEQ ID NO: 48495 - DNA, 45 bp, Artificial Sequence; identical to SEQ ID NO: 1090
  Probe

SEQ ID NO: 48496 - DNA, 46 bp, Artificial Sequence; identical to SEQ ID NO: 6004
  Probe

SEQ ID NO: 48497 - DNA, 47 bp, Artificial Sequence
  Probe
gcccggctagctcagtcggtagagcatgggactcttaatcccagggt

SEQ ID NO: 48498 - DNA, 48 bp, Artificial Sequence; identical to SEQ ID NO: 6005
  Probe

SEQ ID NO: 48499 - DNA, 49 bp, Artificial Sequence; identical to SEQ ID NO: 6006
  Probe

SEQ ID NO: 48500 - DNA, 50 bp, Artificial Sequence; identical to SEQ ID NO: 1091
  Probe

SEQ ID NO: 48501 - DNA, 50 bp, Artificial Sequence; identical to SEQ ID NO: 6007
  Probe

SEQ ID NO: 48502 - DNA, 30 bp, Artificial Sequence; identical to SEQ ID NO: 20839
  Probe

SEQ ID NO: 48503 - DNA, 30 bp, Artificial Sequence; identical to SEQ ID NO: 6008
  Probe

SEQ ID NO: 48504 - DNA, 30 bp, Artificial Sequence; identical to SEQ ID NO: 20841
  Probe

SEQ ID NO: 48505 - DNA, 30 bp, Artificial Sequence; identical to SEQ ID NO: 20842
  Probe

SEQ ID NO: 48506 - DNA, 23 bp, Artificial Sequence
  Probe
gcccggtaatcgcataaaactta

SEQ ID NO: 48507 - DNA, 28 bp, Artificial Sequence
  Probe
gcccggtaatcgcataaaacttaaaact

SEQ ID NO: 48508 - DNA, 40 bp, Artificial Sequence
  Probe
gcccggtaatcgcataaaacttaaaactttacagtcagag

SEQ ID NO: 48509 - DNA, 43 bp, Artificial Sequence
  Probe
gcccggtaatcgcataaaacttaaaactttacagtcagaggtt

SEQ ID NO: 48510 - DNA, 45 bp, Artificial Sequence; identical to SEQ ID NO: 6011
  Probe

SEQ ID NO: 48511 - DNA, 50 bp, Artificial Sequence; identical to SEQ ID NO: 6012
  Probe

SEQ ID NO: 48512 - DNA, 20 bp, Artificial Sequence
  Probe
gccctcagtaagttgcaata

SEQ ID NO: 48513 - DNA, 19 bp, Artificial Sequence
  Probe
gccgaaatagctcagttgg

SEQ ID NO: 48514 - DNA, 21 bp, Artificial Sequence
  Probe
gccgaaatagctcagttggga

SEQ ID NO: 48515 - DNA, 22 bp, Artificial Sequence
  Probe
gccgaaatagctcagttgggag

SEQ ID NO: 48516 - DNA, 23 bp, Artificial Sequence
  Probe
gccgaaatagctcagttgggaga

SEQ ID NO: 48517 - DNA, 25 bp, Artificial Sequence
  Probe
gccgaaatagctcagttgggagagc

SEQ ID NO: 48518 - DNA, 31 bp, Artificial Sequence
  Probe
gccgaaatagctcagttgggagagcgttaga

SEQ ID NO: 48519 - DNA, 32 bp, Artificial Sequence
  Probe
gccgaaatagctcagttgggagagcgttagac

SEQ ID NO: 48520 - DNA, 33 bp, Artificial Sequence
  Probe
gccgaaatagctcagttgggagagcgttagact

SEQ ID NO: 48521 - DNA, 37 bp, Artificial Sequence
  Probe
gccgaggttgtgagttcgagcctcacctggagcattg

SEQ ID NO: 48522 - DNA, 32 bp, Artificial Sequence
  Probe
gccgaggttgtgagttcgatcctcacctggag

SEQ ID NO: 48523 - DNA, 30 bp, Artificial Sequence; identical to SEQ ID NO: 10395
  Probe

SEQ ID NO: 48524 - DNA, 31 bp, Artificial Sequence; identical to SEQ ID NO: 13572
  Probe

SEQ ID NO: 48525 - DNA, 33 bp, Artificial Sequence; identical to SEQ ID NO: 6022
  Probe

SEQ ID NO: 48526 - DNA, 34 bp, Artificial Sequence; identical to SEQ ID NO: 6023
  Probe

SEQ ID NO: 48527 - DNA, 34 bp, Artificial Sequence; identical to SEQ ID NO: 6024
  Probe

SEQ ID NO: 48528 - DNA, 36 bp, Artificial Sequence; identical to SEQ ID NO: 6025
  Probe

SEQ ID NO: 48529 - DNA, 34 bp, Artificial Sequence; identical to SEQ ID NO: 6027
  Probe

SEQ ID NO: 48530 - DNA, 36 bp, Artificial Sequence; identical to SEQ ID NO: 6028
  Probe

SEQ ID NO: 48531 - DNA, 27 bp, Artificial Sequence
  Probe
gccgctggtgtagtggtatcatgcaag

SEQ ID NO: 48532 - DNA, 30 bp, Artificial Sequence; identical to SEQ ID NO: 1100
  Probe

SEQ ID NO: 48533 - DNA, 50 bp, Artificial Sequence
  Probe
gccgctggtgtagtggtatcatgcaagattcccattcttgcgacccgggt

SEQ ID NO: 48534 - DNA, 17 bp, Artificial Sequence
  Probe
gccgtgatcgtatagtg

SEQ ID NO: 48535 - DNA, 18 bp, Artificial Sequence
  Probe
gccgtgatcgtatagtgg

SEQ ID NO: 48536 - DNA, 19 bp, Artificial Sequence
  Probe
gccgtgatcgtatagtggt

SEQ ID NO: 48537 - DNA, 20 bp, Artificial Sequence
  Probe
gccgtgatcgtatagtggtt

SEQ ID NO: 48538 - DNA, 22 bp, Artificial Sequence
  Probe
gccgtgatcgtatagtggttag

SEQ ID NO: 48539 - DNA, 23 bp, Artificial Sequence
  Probe
gccgtgatcgtatagtggttagt

SEQ ID NO: 48540 - DNA, 26 bp, Artificial Sequence
  Probe
gccgtgatcgtatagtggttagtact

SEQ ID NO: 48541 - DNA, 27 bp, Artificial Sequence
  Probe
gccgtgatcgtatagtggttagtactc

SEQ ID NO: 48542 - DNA, 28 bp, Artificial Sequence
  Probe
gccgtgatcgtatagtggttagtactct

SEQ ID NO: 48543 - DNA, 29 bp, Artificial Sequence
  Probe
gccgtgatcgtatagtggttagtactctg

SEQ ID NO: 48544 - DNA, 37 bp, Artificial Sequence; identical to SEQ ID NO: 6039
  Probe

SEQ ID NO: 48545 - DNA, 39 bp, Artificial Sequence; identical to SEQ ID NO: 13591
  Probe

SEQ ID NO: 48546 - DNA, 40 bp, Artificial Sequence; identical to SEQ ID NO: 20911
  Probe

SEQ ID NO: 48547 - DNA, 16 bp, Artificial Sequence
  Probe
gcctccttagcgcagt

SEQ ID NO: 48548 - DNA, 19 bp, Artificial Sequence
  Probe
gcctccttagcgcagtagg

SEQ ID NO: 48549 - DNA, 31 bp, Artificial Sequence
  Probe
gcctccttagcgcagtaggcagcgcgtcagt

SEQ ID NO: 48550 - DNA, 32 bp, Artificial Sequence
  Probe
gcctccttagcgcagtaggcagcgcgtcagtc

SEQ ID NO: 48551 - DNA, 33 bp, Artificial Sequence; identical to SEQ ID NO: 6043
  Probe

SEQ ID NO: 48552 - DNA, 16 bp, Artificial Sequence
  Probe
gcctcgttagcgcagt

SEQ ID NO: 48553 - DNA, 19 bp, Artificial Sequence
  Probe
gcctcgttagcgcagtagg

SEQ ID NO: 48554 - DNA, 31 bp, Artificial Sequence
  Probe
gcctcgttagcgcagtaggcagcgcgtcagt

SEQ ID NO: 48555 - DNA, 33 bp, Artificial Sequence
  Probe
gcctcgttagcgcagtaggcagcgcgtcagtct

SEQ ID NO: 48556 - DNA, 20 bp, Artificial Sequence
  Probe
gcctcgttagcgcagtaggt

SEQ ID NO: 48557 - DNA, 21 bp, Artificial Sequence
  Probe
gcctcgttagcgcagtaggta

SEQ ID NO: 48558 - DNA, 23 bp, Artificial Sequence
  Probe
gcctcgttagcgcagtaggtagc

SEQ ID NO: 48559 - DNA, 24 bp, Artificial Sequence
  Probe
gcctcgttagcgcagtaggtagcg

SEQ ID NO: 48560 - DNA, 25 bp, Artificial Sequence
  Probe
gcctcgttagcgcagtaggtagcgc

SEQ ID NO: 48561 - DNA, 31 bp, Artificial Sequence; identical to SEQ ID NO: 6052
  Probe

SEQ ID NO: 48562 - DNA, 34 bp, Artificial Sequence
  Probe
gcctcgttagcgcagtaggtagcgcgtcagtctc

SEQ ID NO: 48563 - DNA, 29 bp, Artificial Sequence
  Probe
gcctggatagctcagttggtagagcatca

SEQ ID NO: 48564 - DNA, 19 bp, Artificial Sequence
  Probe
gcctgggtagctcagtcgg

SEQ ID NO: 48565 - DNA, 34 bp, Artificial Sequence; identical to SEQ ID NO: 13611
  Probe

SEQ ID NO: 48566 - DNA, 35 bp, Artificial Sequence; identical to SEQ ID NO: 1129
  Probe

SEQ ID NO: 48567 - DNA, 24 bp, Artificial Sequence
  Probe
gcctgtcacgcgggagaccggggt

SEQ ID NO: 48568 - DNA, 43 bp, Artificial Sequence; identical to SEQ ID NO: 36911
  Probe

SEQ ID NO: 48569 - DNA, 44 bp, Artificial Sequence; identical to SEQ ID NO: 6059
  Probe

SEQ ID NO: 48570 - DNA, 46 bp, Artificial Sequence; identical to SEQ ID NO: 6060
  Probe

SEQ ID NO: 48571 - DNA, 49 bp, Artificial Sequence; identical to SEQ ID NO: 6061
  Probe

SEQ ID NO: 48572 - DNA, 41 bp, Artificial Sequence; identical to SEQ ID NO: 13622
  Probe

SEQ ID NO: 48573 - DNA, 44 bp, Artificial Sequence; identical to SEQ ID NO: 6062
  Probe

SEQ ID NO: 48574 - DNA, 50 bp, Artificial Sequence; identical to SEQ ID NO: 6063
  Probe

SEQ ID NO: 48575 - DNA, 46 bp, Artificial Sequence; identical to SEQ ID NO: 6064
  Probe

SEQ ID NO: 48576 - DNA, 44 bp, Artificial Sequence; identical to SEQ ID NO: 6065
  Probe

SEQ ID NO: 48577 - DNA, 46 bp, Artificial Sequence; identical to SEQ ID NO: 20972
  Probe

SEQ ID NO: 48578 - DNA, 46 bp, Artificial Sequence; identical to SEQ ID NO: 6066
  Probe

SEQ ID NO: 48579 - DNA, 49 bp, Artificial Sequence; identical to SEQ ID NO: 6067
  Probe

SEQ ID NO: 48580 - DNA, 50 bp, Artificial Sequence; identical to SEQ ID NO: 6068
  Probe

SEQ ID NO: 48581 - DNA, 49 bp, Artificial Sequence; identical to SEQ ID NO: 6069
  Probe

SEQ ID NO: 48582 - DNA, 50 bp, Artificial Sequence; identical to SEQ ID NO: 20978
  Probe

SEQ ID NO: 48583 - DNA, 46 bp, Artificial Sequence; identical to SEQ ID NO: 6070
  Probe

SEQ ID NO: 48584 - DNA, 50 bp, Artificial Sequence; identical to SEQ ID NO: 20980
  Probe

SEQ ID NO: 48585 - DNA, 50 bp, Artificial Sequence; identical to SEQ ID NO: 20981
  Probe

SEQ ID NO: 48586 - DNA, 31 bp, Artificial Sequence; identical to SEQ ID NO: 31932
  Probe

SEQ ID NO: 48587 - DNA, 32 bp, Artificial Sequence; identical to SEQ ID NO: 6071
  Probe

SEQ ID NO: 48588 - DNA, 24 bp, Artificial Sequence
  Probe
gccttttttcccggcggcgggaga

SEQ ID NO: 48589 - DNA, 25 bp, Artificial Sequence
  Probe
gccttttttcccggcggcgggagaa

SEQ ID NO: 48590 - DNA, 26 bp, Artificial Sequence
  Probe
gccttttttcccggcggcgggagaag

SEQ ID NO: 48591 - DNA, 27 bp, Artificial Sequence
  Probe
gccttttttcccggcggcgggagaagt

SEQ ID NO: 48592 - DNA, 31 bp, Artificial Sequence; identical to SEQ ID NO: 20994
  Probe

SEQ ID NO: 48593 - DNA, 32 bp, Artificial Sequence; identical to SEQ ID NO: 6077
  Probe

SEQ ID NO: 48594 - DNA, 35 bp, Artificial Sequence
  Probe
gcgaaaggtccccggttcgaaaccgggcggaaaca

SEQ ID NO: 48595 - DNA, 38 bp, Artificial Sequence; identical to SEQ ID NO: 6078
  Probe

SEQ ID NO: 48596 - DNA, 16 bp, Artificial Sequence
  Probe
gcgagaggtcccgggt

SEQ ID NO: 48597 - DNA, 35 bp, Artificial Sequence; identical to SEQ ID NO: 21006
  Probe

SEQ ID NO: 48598 - DNA, 27 bp, Artificial Sequence
  Probe
gcgatccgagttcaaatctcggtggaa

SEQ ID NO: 48599 - DNA, 28 bp, Artificial Sequence
  Probe
gcgatccgagttcaaatctcggtggaac

SEQ ID NO: 48600 - DNA, 29 bp, Artificial Sequence
  Probe
gcgatccgagttcaaatctcggtggaacc

SEQ ID NO: 48601 - DNA, 31 bp, Artificial Sequence; identical to SEQ ID NO: 21016
  Probe

SEQ ID NO: 48602 - DNA, 33 bp, Artificial Sequence; identical to SEQ ID NO: 6084
  Probe

SEQ ID NO: 48603 - DNA, 31 bp, Artificial Sequence; identical to SEQ ID NO: 21018
  Probe

SEQ ID NO: 48604 - DNA, 28 bp, Artificial Sequence
  Probe
gcgatccgagttcaaatctcggtgggac

SEQ ID NO: 48605 - DNA, 31 bp, Artificial Sequence
  Probe
gcgatccgagttcaaatctcggtgggacctc

SEQ ID NO: 48606 - DNA, 33 bp, Artificial Sequence; identical to SEQ ID NO: 6086
  Probe

SEQ ID NO: 48607 - DNA, 18 bp, Artificial Sequence
  Probe
gcgcaagtaggtctacaa

SEQ ID NO: 48608 - DNA, 25 bp, Artificial Sequence
  Probe
gcgcaggttcgaatcctgccgacta

SEQ ID NO: 48609 - DNA, 24 bp, Artificial Sequence
  Probe
gcgccgctggtgtagtggtatcat

SEQ ID NO: 48610 - DNA, 38 bp, Artificial Sequence; identical to SEQ ID NO: 6089
  Probe

SEQ ID NO: 48611 - DNA, 41 bp, Artificial Sequence; identical to SEQ ID NO: 1159
  Probe

SEQ ID NO: 48612 - DNA, 42 bp, Artificial Sequence; identical to SEQ ID NO: 6090
  Probe

SEQ ID NO: 48613 - DNA, 43 bp, Artificial Sequence; identical to SEQ ID NO: 6091
  Probe

SEQ ID NO: 48614 - DNA, 44 bp, Artificial Sequence; identical to SEQ ID NO: 6092
  Probe

SEQ ID NO: 48615 - DNA, 45 bp, Artificial Sequence; identical to SEQ ID NO: 6093
  Probe

SEQ ID NO: 48616 - DNA, 46 bp, Artificial Sequence; identical to SEQ ID NO: 1160
  Probe

SEQ ID NO: 48617 - DNA, 47 bp, Artificial Sequence; identical to SEQ ID NO: 6094
  Probe

SEQ ID NO: 48618 - DNA, 48 bp, Artificial Sequence; identical to SEQ ID NO: 6095
  Probe

SEQ ID NO: 48619 - DNA, 49 bp, Artificial Sequence; identical to SEQ ID NO: 6096
  Probe

SEQ ID NO: 48620 - DNA, 50 bp, Artificial Sequence; identical to SEQ ID NO: 40499
  Probe

SEQ ID NO: 48621 - DNA, 44 bp, Artificial Sequence
  Probe
gcgctctcaccgccgcggcccgggttcgattcccggtcagggaa

SEQ ID NO: 48622 - DNA, 50 bp, Artificial Sequence; identical to SEQ ID NO: 21045
  Probe

SEQ ID NO: 48623 - DNA, 50 bp, Artificial Sequence; identical to SEQ ID NO: 6097
  Probe

SEQ ID NO: 48624 - DNA, 19 bp, Artificial Sequence
  Probe
gcggaagcgtgctgggccc

SEQ ID NO: 48625 - DNA, 35 bp, Artificial Sequence; identical to SEQ ID NO: 1163
  Probe

SEQ ID NO: 48626 - DNA, 37 bp, Artificial Sequence; identical to SEQ ID NO: 1164
  Probe

SEQ ID NO: 48627 - DNA, 39 bp, Artificial Sequence; identical to SEQ ID NO: 21050
  Probe

SEQ ID NO: 48628 - DNA, 50 bp, Artificial Sequence
  Probe
gcggaagcgtgctgggcccataacccagaggtcgatggatcgaaaccatc

SEQ ID NO: 48629 - DNA, 26 bp, Artificial Sequence
  Probe
gcggcccgggttcgactcccggtgtg

SEQ ID NO: 48630 - DNA, 27 bp, Artificial Sequence
  Probe
gcggcccgggttcgactcccggtgtgg

SEQ ID NO: 48631 - DNA, 28 bp, Artificial Sequence
  Probe
gcggcccgggttcgactcccggtgtggg

SEQ ID NO: 48632 - DNA, 30 bp, Artificial Sequence; identical to SEQ ID NO: 13658
  Probe

SEQ ID NO: 48633 - DNA, 31 bp, Artificial Sequence; identical to SEQ ID NO: 1165
  Probe

SEQ ID NO: 48634 - DNA, 33 bp, Artificial Sequence; identical to SEQ ID NO: 6099
  Probe

SEQ ID NO: 48635 - DNA, 28 bp, Artificial Sequence
  Probe
gcggcccgggttcgattcccggtcaggg

SEQ ID NO: 48636 - DNA, 30 bp, Artificial Sequence; identical to SEQ ID NO: 13662
  Probe

SEQ ID NO: 48637 - DNA, 31 bp, Artificial Sequence; identical to SEQ ID NO: 6101
  Probe

SEQ ID NO: 48638 - DNA, 31 bp, Artificial Sequence; identical to SEQ ID NO: 6102
  Probe

SEQ ID NO: 48639 - DNA, 31 bp, Artificial Sequence; identical to SEQ ID NO: 6103
  Probe

SEQ ID NO: 48640 - DNA, 33 bp, Artificial Sequence; identical to SEQ ID NO: 6104
  Probe

SEQ ID NO: 48641 - DNA, 31 bp, Artificial Sequence; identical to SEQ ID NO: 6105
  Probe

SEQ ID NO: 48642 - DNA, 35 bp, Artificial Sequence; identical to SEQ ID NO: 6108
  Probe

SEQ ID NO: 48643 - DNA, 37 bp, Artificial Sequence; identical to SEQ ID NO: 6109
  Probe

SEQ ID NO: 48644 - DNA, 19 bp, Artificial Sequence
  Probe
gcgggagaccggggttcga

SEQ ID NO: 48645 - DNA, 28 bp, Artificial Sequence
  Probe
gcgggagaccggggttcgattccccgac

SEQ ID NO: 48646 - DNA, 35 bp, Artificial Sequence; identical to SEQ ID NO: 6112
  Probe

SEQ ID NO: 48647 - DNA, 37 bp, Artificial Sequence; identical to SEQ ID NO: 6114
  Probe

SEQ ID NO: 48648 - DNA, 36 bp, Artificial Sequence; identical to SEQ ID NO: 6115
  Probe

SEQ ID NO: 48649 - DNA, 37 bp, Artificial Sequence; identical to SEQ ID NO: 6116
  Probe

SEQ ID NO: 48650 - DNA, 37 bp, Artificial Sequence; identical to SEQ ID NO: 6117
  Probe

SEQ ID NO: 48651 - DNA, 35 bp, Artificial Sequence; identical to SEQ ID NO: 6118
  Probe

SEQ ID NO: 48652 - DNA, 36 bp, Artificial Sequence; identical to SEQ ID NO: 6120
  Probe

SEQ ID NO: 48653 - DNA, 37 bp, Artificial Sequence; identical to SEQ ID NO: 6121
  Probe

SEQ ID NO: 48654 - DNA, 37 bp, Artificial Sequence; identical to SEQ ID NO: 6122
  Probe

SEQ ID NO: 48655 - DNA, 33 bp, Artificial Sequence; identical to SEQ ID NO: 6124
  Probe

SEQ ID NO: 48656 - DNA, 34 bp, Artificial Sequence; identical to SEQ ID NO: 6125
  Probe

SEQ ID NO: 48657 - DNA, 37 bp, Artificial Sequence; identical to SEQ ID NO: 6128
  Probe

SEQ ID NO: 48658 - DNA, 36 bp, Artificial Sequence; identical to SEQ ID NO: 21112
  Probe

SEQ ID NO: 48659 - DNA, 29 bp, Artificial Sequence
  Probe
gcgtgctgggcccataacccagaggtcga

SEQ ID NO: 48660 - DNA, 31 bp, Artificial Sequence; identical to SEQ ID NO: 1178
  Probe

SEQ ID NO: 48661 - DNA, 25 bp, Artificial Sequence
  Probe
gcgtgggttcgaatcccatcctcgt

SEQ ID NO: 48662 - DNA, 16 bp, Artificial Sequence
  Probe
gcgttggtggtatagt

SEQ ID NO: 48663 - DNA, 17 bp, Artificial Sequence
  Probe
gcgttggtggtatagtg

SEQ ID NO: 48664 - DNA, 18 bp, Artificial Sequence
  Probe
gcgttggtggtatagtgg

SEQ ID NO: 48665 - DNA, 19 bp, Artificial Sequence
  Probe
gcgttggtggtatagtggt

SEQ ID NO: 48666 - DNA, 20 bp, Artificial Sequence
  Probe
gcgttggtggtatagtggta

SEQ ID NO: 48667 - DNA, 26 bp, Artificial Sequence
  Probe
gcgttggtggtatagtggtaagcata

SEQ ID NO: 48668 - DNA, 27 bp, Artificial Sequence
  Probe
gcgttggtggtatagtggtaagcatag

SEQ ID NO: 48669 - DNA, 28 bp, Artificial Sequence
  Probe
gcgttggtggtatagtggtaagcatagc

SEQ ID NO: 48670 - DNA, 29 bp, Artificial Sequence
  Probe
gcgttggtggtatagtggtaagcatagct

SEQ ID NO: 48671 - DNA, 37 bp, Artificial Sequence; identical to SEQ ID NO: 1190
  Probe

SEQ ID NO: 48672 - DNA, 40 bp, Artificial Sequence; identical to SEQ ID NO: 6137
  Probe

SEQ ID NO: 48673 - DNA, 44 bp, Artificial Sequence; identical to SEQ ID NO: 1191
  Probe

SEQ ID NO: 48674 - DNA, 48 bp, Artificial Sequence; identical to SEQ ID NO: 6139
  Probe

SEQ ID NO: 48675 - DNA, 49 bp, Artificial Sequence; identical to SEQ ID NO: 6140
  Probe

SEQ ID NO: 48676 - DNA, 50 bp, Artificial Sequence; identical to SEQ ID NO: 1192
  Probe

SEQ ID NO: 48677 - DNA, 20 bp, Artificial Sequence
  Probe
gcgttggtggtatagtggtg

SEQ ID NO: 48678 - DNA, 22 bp, Artificial Sequence
  Probe
gcgttggtggtatagtggtgag

SEQ ID NO: 48679 - DNA, 23 bp, Artificial Sequence
  Probe
gcgttggtggtatagtggtgagc

SEQ ID NO: 48680 - DNA, 24 bp, Artificial Sequence
  Probe
gcgttggtggtatagtggtgagca

SEQ ID NO: 48681 - DNA, 26 bp, Artificial Sequence
  Probe
gcgttggtggtatagtggtgagcata

SEQ ID NO: 48682 - DNA, 27 bp, Artificial Sequence
  Probe
gcgttggtggtatagtggtgagcatag

SEQ ID NO: 48683 - DNA, 28 bp, Artificial Sequence
  Probe
gcgttggtggtatagtggtgagcatagc

SEQ ID NO: 48684 - DNA, 29 bp, Artificial Sequence
  Probe
gcgttggtggtatagtggtgagcatagct

SEQ ID NO: 48685 - DNA, 30 bp, Artificial Sequence; identical to SEQ ID NO: 6150
  Probe

SEQ ID NO: 48686 - DNA, 31 bp, Artificial Sequence; identical to SEQ ID NO: 6151
  Probe

SEQ ID NO: 48687 - DNA, 32 bp, Artificial Sequence; identical to SEQ ID NO: 6152
  Probe

SEQ ID NO: 48688 - DNA, 33 bp, Artificial Sequence; identical to SEQ ID NO: 6153
  Probe

SEQ ID NO: 48689 - DNA, 34 bp, Artificial Sequence; identical to SEQ ID NO: 6154
  Probe

SEQ ID NO: 48690 - DNA, 35 bp, Artificial Sequence; identical to SEQ ID NO: 6155
  Probe

SEQ ID NO: 48691 - DNA, 36 bp, Artificial Sequence; identical to SEQ ID NO: 6156
  Probe

SEQ ID NO: 48692 - DNA, 37 bp, Artificial Sequence; identical to SEQ ID NO: 6157
  Probe

SEQ ID NO: 48693 - DNA, 39 bp, Artificial Sequence; identical to SEQ ID NO: 6158
  Probe

SEQ ID NO: 48694 - DNA, 41 bp, Artificial Sequence; identical to SEQ ID NO: 13692
  Probe

SEQ ID NO: 48695 - DNA, 43 bp, Artificial Sequence; identical to SEQ ID NO: 6159
  Probe

SEQ ID NO: 48696 - DNA, 48 bp, Artificial Sequence; identical to SEQ ID NO: 6163
  Probe

SEQ ID NO: 48697 - DNA, 49 bp, Artificial Sequence; identical to SEQ ID NO: 6164
  Probe

SEQ ID NO: 48698 - DNA, 36 bp, Artificial Sequence; identical to SEQ ID NO: 21152
  Probe

SEQ ID NO: 48699 - DNA, 20 bp, Artificial Sequence
  Probe
gcgttggtggtatagtggtt

SEQ ID NO: 48700 - DNA, 22 bp, Artificial Sequence
  Probe
gcgttggtggtatagtggttag

SEQ ID NO: 48701 - DNA, 23 bp, Artificial Sequence
  Probe
gcgttggtggtatagtggttagc

SEQ ID NO: 48702 - DNA, 24 bp, Artificial Sequence
  Probe
gcgttggtggtatagtggttagca

SEQ ID NO: 48703 - DNA, 26 bp, Artificial Sequence
  Probe
gcgttggtggtatagtggttagcata

SEQ ID NO: 48704 - DNA, 27 bp, Artificial Sequence
  Probe
gcgttggtggtatagtggttagcatag

SEQ ID NO: 48705 - DNA, 28 bp, Artificial Sequence
  Probe
gcgttggtggtatagtggttagcatagc

SEQ ID NO: 48706 - DNA, 29 bp, Artificial Sequence
  Probe
gcgttggtggtatagtggttagcatagct

SEQ ID NO: 48707 - DNA, 30 bp, Artificial Sequence; identical to SEQ ID NO: 6172
  Probe

SEQ ID NO: 48708 - DNA, 31 bp, Artificial Sequence; identical to SEQ ID NO: 6173
  Probe

SEQ ID NO: 48709 - DNA, 32 bp, Artificial Sequence; identical to SEQ ID NO: 6174
  Probe

SEQ ID NO: 48710 - DNA, 33 bp, Artificial Sequence; identical to SEQ ID NO: 6175
  Probe

SEQ ID NO: 48711 - DNA, 34 bp, Artificial Sequence; identical to SEQ ID NO: 6176
  Probe

SEQ ID NO: 48712 - DNA, 35 bp, Artificial Sequence; identical to SEQ ID NO: 6177
  Probe

SEQ ID NO: 48713 - DNA, 36 bp, Artificial Sequence; identical to SEQ ID NO: 6178
  Probe

SEQ ID NO: 48714 - DNA, 37 bp, Artificial Sequence; identical to SEQ ID NO: 6179
  Probe

SEQ ID NO: 48715 - DNA, 39 bp, Artificial Sequence; identical to SEQ ID NO: 6180
  Probe

SEQ ID NO: 48716 - DNA, 40 bp, Artificial Sequence; identical to SEQ ID NO: 6181
  Probe

SEQ ID NO: 48717 - DNA, 44 bp, Artificial Sequence; identical to SEQ ID NO: 1196
  Probe

SEQ ID NO: 48718 - DNA, 48 bp, Artificial Sequence; identical to SEQ ID NO: 6184
  Probe

SEQ ID NO: 48719 - DNA, 49 bp, Artificial Sequence; identical to SEQ ID NO: 6185
  Probe

SEQ ID NO: 48720 - DNA, 50 bp, Artificial Sequence; identical to SEQ ID NO: 1197
  Probe

SEQ ID NO: 48721 - DNA, 27 bp, Artificial Sequence
  Probe
gcgttggtggtttagtggtagaattct

SEQ ID NO: 48722 - DNA, 29 bp, Artificial Sequence
  Probe
gcgttggtggtttagtggtagaattctcg

SEQ ID NO: 48723 - DNA, 30 bp, Artificial Sequence; identical to SEQ ID NO: 10512
  Probe

SEQ ID NO: 48724 - DNA, 31 bp, Artificial Sequence; identical to SEQ ID NO: 6187
  Probe

SEQ ID NO: 48725 - DNA, 32 bp, Artificial Sequence; identical to SEQ ID NO: 6188
  Probe

SEQ ID NO: 48726 - DNA, 16 bp, Artificial Sequence
  Probe
gctaaacctagcccca

SEQ ID NO: 48727 - DNA, 17 bp, Artificial Sequence
  Probe
gctaaacctagccccaa

SEQ ID NO: 48728 - DNA, 18 bp, Artificial Sequence
  Probe
gctaaacctagccccaaa

SEQ ID NO: 48729 - DNA, 19 bp, Artificial Sequence
  Probe
gctaaacctagccccaaac

SEQ ID NO: 48730 - DNA, 20 bp, Artificial Sequence
  Probe
gctaaacctagccccaaacc

SEQ ID NO: 48731 - DNA, 21 bp, Artificial Sequence
  Probe
gctaaacctagccccaaaccc

SEQ ID NO: 48732 - DNA, 22 bp, Artificial Sequence
  Probe
gctaaacctagccccaaaccca

SEQ ID NO: 48733 - DNA, 23 bp, Artificial Sequence
  Probe
gctaaacctagccccaaacccac

SEQ ID NO: 48734 - DNA, 24 bp, Artificial Sequence
  Probe
gctaaacctagccccaaacccact

SEQ ID NO: 48735 - DNA, 25 bp, Artificial Sequence
  Probe
gctaaacctagccccaaacccactc

SEQ ID NO: 48736 - DNA, 26 bp, Artificial Sequence
  Probe
gctaaacctagccccaaacccactcc

SEQ ID NO: 48737 - DNA, 27 bp, Artificial Sequence
  Probe
gctaaacctagccccaaacccactcca

SEQ ID NO: 48738 - DNA, 28 bp, Artificial Sequence
  Probe
gctaaacctagccccaaacccactccac

SEQ ID NO: 48739 - DNA, 29 bp, Artificial Sequence
  Probe
gctaaacctagccccaaacccactccacc

SEQ ID NO: 48740 - DNA, 30 bp, Artificial Sequence; identical to SEQ ID NO: 6203
  Probe

SEQ ID NO: 48741 - DNA, 26 bp, Artificial Sequence
  Probe
gctaaataagctatcgggcccatacc

SEQ ID NO: 48742 - DNA, 27 bp, Artificial Sequence
  Probe
gctaaataagctatcgggcccataccc

SEQ ID NO: 48743 - DNA, 28 bp, Artificial Sequence
  Probe
gctaaataagctatcgggcccatacccc

SEQ ID NO: 48744 - DNA, 29 bp, Artificial Sequence
  Probe
gctaaataagctatcgggcccataccccg

SEQ ID NO: 48745 - DNA, 38 bp, Artificial Sequence
  Probe
gctaaataagctatcgggcccataccccgaaaatgttg

SEQ ID NO: 48746 - DNA, 46 bp, Artificial Sequence; identical to SEQ ID NO: 6209
  Probe

SEQ ID NO: 48747 - DNA, 49 bp, Artificial Sequence; identical to SEQ ID NO: 6210
  Probe

SEQ ID NO: 48748 - DNA, 50 bp, Artificial Sequence; identical to SEQ ID NO: 6211
  Probe

SEQ ID NO: 48749 - DNA, 23 bp, Artificial Sequence
  Probe
gctaaatcctatatatcttaatg

SEQ ID NO: 48750 - DNA, 21 bp, Artificial Sequence
  Probe
gctaactcatgcccccatgtc

SEQ ID NO: 48751 - DNA, 22 bp, Artificial Sequence
  Probe
gctaactcatgcccccatgtct

SEQ ID NO: 48752 - DNA, 26 bp, Artificial Sequence
  Probe
gctaactcatgcccccatgtctaaca

SEQ ID NO: 48753 - DNA, 29 bp, Artificial Sequence
  Probe
gctaactcatgcccccatgtctaacaaca

SEQ ID NO: 48754 - DNA, 37 bp, Artificial Sequence; identical to SEQ ID NO: 6220
  Probe

SEQ ID NO: 48755 - DNA, 38 bp, Artificial Sequence; identical to SEQ ID NO: 6221
  Probe

SEQ ID NO: 48756 - DNA, 40 bp, Artificial Sequence; identical to SEQ ID NO: 6223
  Probe

SEQ ID NO: 48757 - DNA, 41 bp, Artificial Sequence; identical to SEQ ID NO: 6224
  Probe

SEQ ID NO: 48758 - DNA, 42 bp, Artificial Sequence; identical to SEQ ID NO: 6225
  Probe

SEQ ID NO: 48759 - DNA, 43 bp, Artificial Sequence; identical to SEQ ID NO: 6226
  Probe

SEQ ID NO: 48760 - DNA, 50 bp, Artificial Sequence; identical to SEQ ID NO: 6227
  Probe

SEQ ID NO: 48761 - DNA, 43 bp, Artificial Sequence
  Probe
gctaacttagcattaaccttttaagttaaagattaagagaacc

SEQ ID NO: 48762 - DNA, 23 bp, Artificial Sequence
  Probe
gctaaggaagtcctgtgctcagt

SEQ ID NO: 48763 - DNA, 26 bp, Artificial Sequence
  Probe
gctaaggaagtcctgtgctcagtttt

SEQ ID NO: 48764 - DNA, 50 bp, Artificial Sequence
  Probe
gctaataacgccaaggtcgcgggttcgatccccgtacgggccacaggctt

SEQ ID NO: 48765 - DNA, 46 bp, Artificial Sequence
  Probe
gctaataacgccaaggtcgcgggttcgatccccgtactggccacgt

SEQ ID NO: 48766 - DNA, 16 bp, Artificial Sequence
  Probe
gctaatggtggagtta

SEQ ID NO: 48767 - DNA, 18 bp, Artificial Sequence
  Probe
gctaatggtggagttaaa

SEQ ID NO: 48768 - DNA, 19 bp, Artificial Sequence
  Probe
gctaatggtggagttaaag

SEQ ID NO: 48769 - DNA, 20 bp, Artificial Sequence
  Probe
gctaatggtggagttaaaga

SEQ ID NO: 48770 - DNA, 32 bp, Artificial Sequence; identical to SEQ ID NO: 1198
  Probe

SEQ ID NO: 48771 - DNA, 34 bp, Artificial Sequence; identical to SEQ ID NO: 6233
  Probe

SEQ ID NO: 48772 - DNA, 35 bp, Artificial Sequence; identical to SEQ ID NO: 6234
  Probe

SEQ ID NO: 48773 - DNA, 37 bp, Artificial Sequence; identical to SEQ ID NO: 6235
  Probe

SEQ ID NO: 48774 - DNA, 38 bp, Artificial Sequence; identical to SEQ ID NO: 6236
  Probe

SEQ ID NO: 48775 - DNA, 39 bp, Artificial Sequence; identical to SEQ ID NO: 6237
  Probe

SEQ ID NO: 48776 - DNA, 40 bp, Artificial Sequence; identical to SEQ ID NO: 6238
  Probe

SEQ ID NO: 48777 - DNA, 41 bp, Artificial Sequence; identical to SEQ ID NO: 6239
  Probe

SEQ ID NO: 48778 - DNA, 42 bp, Artificial Sequence; identical to SEQ ID NO: 6240
  Probe

SEQ ID NO: 48779 - DNA, 43 bp, Artificial Sequence; identical to SEQ ID NO: 6241
  Probe

SEQ ID NO: 48780 - DNA, 44 bp, Artificial Sequence
  Probe
gctaatggtggagttaaagactttttctctgatttgtccttgga

SEQ ID NO: 48781 - DNA, 21 bp, Artificial Sequence
  Probe
gctacttttaaattctgacct

SEQ ID NO: 48782 - DNA, 22 bp, Artificial Sequence
  Probe
gctacttttaaattctgacctc

SEQ ID NO: 48783 - DNA, 23 bp, Artificial Sequence
  Probe
gctacttttaaattctgacctca

SEQ ID NO: 48784 - DNA, 26 bp, Artificial Sequence
  Probe
gctagctcagtcggtagagcatggga

SEQ ID NO: 48785 - DNA, 27 bp, Artificial Sequence
  Probe
gctagctcagtcggtagagcatgggac

SEQ ID NO: 48786 - DNA, 28 bp, Artificial Sequence
  Probe
gctagctcagtcggtagagcatgggact

SEQ ID NO: 48787 - DNA, 16 bp, Artificial Sequence
  Probe
gctatccattggtctt

SEQ ID NO: 48788 - DNA, 50 bp, Artificial Sequence
  Probe
gctatccattggtcttaggccccaaaaattttggtgcaactccaaataaa

SEQ ID NO: 48789 - DNA, 19 bp, Artificial Sequence
  Probe
gctatcgggcccatacccc

SEQ ID NO: 48790 - DNA, 20 bp, Artificial Sequence
  Probe
gctatcgggcccataccccg

SEQ ID NO: 48791 - DNA, 21 bp, Artificial Sequence
  Probe
gctatcgggcccataccccga

SEQ ID NO: 48792 - DNA, 22 bp, Artificial Sequence
  Probe
gctatcgggcccataccccgaa

SEQ ID NO: 48793 - DNA, 23 bp, Artificial Sequence
  Probe
gctatcgggcccataccccgaaa

SEQ ID NO: 48794 - DNA, 24 bp, Artificial Sequence
  Probe
gctatcgggcccataccccgaaaa

SEQ ID NO: 48795 - DNA, 25 bp, Artificial Sequence
  Probe
gctatcgggcccataccccgaaaat

SEQ ID NO: 48796 - DNA, 26 bp, Artificial Sequence
  Probe
gctatcgggcccataccccgaaaatg

SEQ ID NO: 48797 - DNA, 27 bp, Artificial Sequence
  Probe
gctatcgggcccataccccgaaaatgt

SEQ ID NO: 48798 - DNA, 28 bp, Artificial Sequence
  Probe
gctatcgggcccataccccgaaaatgtt

SEQ ID NO: 48799 - DNA, 29 bp, Artificial Sequence
  Probe
gctatcgggcccataccccgaaaatgttg

SEQ ID NO: 48800 - DNA, 30 bp, Artificial Sequence; identical to SEQ ID NO: 6264
  Probe

SEQ ID NO: 48801 - DNA, 37 bp, Artificial Sequence
  Probe
gctatcgggcccataccccgaaaatgttggttatacc

SEQ ID NO: 48802 - DNA, 42 bp, Artificial Sequence; identical to SEQ ID NO: 21265
  Probe

SEQ ID NO: 48803 - DNA, 44 bp, Artificial Sequence
  Probe
gctatcgggcccataccccgaaaatgttggttatacccttcccg

SEQ ID NO: 48804 - DNA, 46 bp, Artificial Sequence; identical to SEQ ID NO: 6267
  Probe

SEQ ID NO: 48805 - DNA, 48 bp, Artificial Sequence; identical to SEQ ID NO: 6268
  Probe

SEQ ID NO: 48806 - DNA, 50 bp, Artificial Sequence; identical to SEQ ID NO: 6269
  Probe

SEQ ID NO: 48807 - DNA, 24 bp, Artificial Sequence
  Probe
gctcacaagaactgctaactcatg

SEQ ID NO: 48808 - DNA, 25 bp, Artificial Sequence
  Probe
gctcacaagaactgctaactcatgc

SEQ ID NO: 48809 - DNA, 26 bp, Artificial Sequence
  Probe
gctcacaagaactgctaactcatgcc

SEQ ID NO: 48810 - DNA, 28 bp, Artificial Sequence
  Probe
gctcacaagaactgctaactcatgcccc

SEQ ID NO: 48811 - DNA, 31 bp, Artificial Sequence
  Probe
gctcacaagaactgctaactcatgcccccat

SEQ ID NO: 48812 - DNA, 34 bp, Artificial Sequence
  Probe
gctcacaagaactgctaactcatgcccccatgtc

SEQ ID NO: 48813 - DNA, 35 bp, Artificial Sequence
  Probe
gctcacaagaactgctaactcatgcccccatgtct

SEQ ID NO: 48814 - DNA, 16 bp, Artificial Sequence
  Probe
gctcacatcaccccat

SEQ ID NO: 48815 - DNA, 17 bp, Artificial Sequence
  Probe
gctcacatcaccccata

SEQ ID NO: 48816 - DNA, 18 bp, Artificial Sequence
  Probe
gctcacatcaccccataa

SEQ ID NO: 48817 - DNA, 21 bp, Artificial Sequence
  Probe
gctcacatcaccccataaaca

SEQ ID NO: 48818 - DNA, 23 bp, Artificial Sequence
  Probe
gctcacatcaccccataaacaaa

SEQ ID NO: 48819 - DNA, 24 bp, Artificial Sequence
  Probe
gctcacatcaccccataaacaaat

SEQ ID NO: 48820 - DNA, 31 bp, Artificial Sequence
  Probe
gctccagtggcgcaatcggttagcgcgcggt

SEQ ID NO: 48821 - DNA, 33 bp, Artificial Sequence; identical to SEQ ID NO: 6280
  Probe

SEQ ID NO: 48822 - DNA, 35 bp, Artificial Sequence
  Probe
gctccagtggcgcaatcggttagcgcgcggtactt

SEQ ID NO: 48823 - DNA, 36 bp, Artificial Sequence; identical to SEQ ID NO: 21286
  Probe

SEQ ID NO: 48824 - DNA, 18 bp, Artificial Sequence
  Probe
gctccgaggtgattttca

SEQ ID NO: 48825 - DNA, 30 bp, Artificial Sequence; identical to SEQ ID NO: 1206
  Probe

SEQ ID NO: 48826 - DNA, 32 bp, Artificial Sequence; identical to SEQ ID NO: 6283
  Probe

SEQ ID NO: 48827 - DNA, 36 bp, Artificial Sequence; identical to SEQ ID NO: 32107
  Probe

SEQ ID NO: 48828 - DNA, 37 bp, Artificial Sequence
  Probe
gctccgaggtgattttcatattgaattgcaaattcga

SEQ ID NO: 48829 - DNA, 40 bp, Artificial Sequence
  Probe
gctccgaggtgattttcatattgaattgcaaattcgaaga

SEQ ID NO: 48830 - DNA, 43 bp, Artificial Sequence
  Probe
gctccgaggtgattttcatattgaattgcaaattcgaagaagc

SEQ ID NO: 48831 - DNA, 44 bp, Artificial Sequence; identical to SEQ ID NO: 21294
  Probe

SEQ ID NO: 48832 - DNA, 46 bp, Artificial Sequence; identical to SEQ ID NO: 6285
  Probe

SEQ ID NO: 48833 - DNA, 48 bp, Artificial Sequence
  Probe
gctccgaggtgattttcatattgaattgcaaattcgaagaagcagctt

SEQ ID NO: 48834 - DNA, 50 bp, Artificial Sequence; identical to SEQ ID NO: 6286
  Probe

SEQ ID NO: 48835 - DNA, 50 bp, Artificial Sequence
  Probe
gctgccttccaagcagttgacccgggttcgattcccggccaacgcagtgt

SEQ ID NO: 48836 - DNA, 31 bp, Artificial Sequence; identical to SEQ ID NO: 6288
  Probe

SEQ ID NO: 48837 - DNA, 31 bp, Artificial Sequence; identical to SEQ ID NO: 21305
  Probe

SEQ ID NO: 48838 - DNA, 25 bp, Artificial Sequence
  Probe
gctggtgtagtggtatcatgcaaga

SEQ ID NO: 48839 - DNA, 24 bp, Artificial Sequence
  Probe
gctgtgatggccgagtggttaagg

SEQ ID NO: 48840 - DNA, 22 bp, Artificial Sequence
  Probe
gctgttaaccgaaaggttggtg

SEQ ID NO: 48841 - DNA, 24 bp, Artificial Sequence
  Probe
gctgttaaccgaaaggttggtggt

SEQ ID NO: 48842 - DNA, 43 bp, Artificial Sequence; identical to SEQ ID NO: 40656
  Probe

SEQ ID NO: 48843 - DNA, 26 bp, Artificial Sequence
  Probe
gctgttaactaagtgtttgtgggttt

SEQ ID NO: 48844 - DNA, 33 bp, Artificial Sequence
  Probe
gctgttaactaagtgtttgtgggtttaagtccc

SEQ ID NO: 48845 - DNA, 40 bp, Artificial Sequence; identical to SEQ ID NO: 6299
  Probe

SEQ ID NO: 48846 - DNA, 42 bp, Artificial Sequence; identical to SEQ ID NO: 21316
  Probe

SEQ ID NO: 48847 - DNA, 44 bp, Artificial Sequence; identical to SEQ ID NO: 6300
  Probe

SEQ ID NO: 48848 - DNA, 45 bp, Artificial Sequence; identical to SEQ ID NO: 6301
  Probe

SEQ ID NO: 48849 - DNA, 46 bp, Artificial Sequence; identical to SEQ ID NO: 6302
  Probe

SEQ ID NO: 48850 - DNA, 25 bp, Artificial Sequence
  Probe
gctgttacagaaattaagtattgca

SEQ ID NO: 48851 - DNA, 28 bp, Artificial Sequence
  Probe
gctgttacagaaattaagtattgcaact

SEQ ID NO: 48852 - DNA, 30 bp, Artificial Sequence; identical to SEQ ID NO: 6308
  Probe

SEQ ID NO: 48853 - DNA, 23 bp, Artificial Sequence
  Probe
gcttaaacccccttatttctagg

SEQ ID NO: 48854 - DNA, 22 bp, Artificial Sequence
  Probe
gcttacgaccccttatttaccg

SEQ ID NO: 48855 - DNA, 50 bp, Artificial Sequence
  Probe
gcttagctgttaactaagtgtttgtgggtttaagtcccattggtctagta

SEQ ID NO: 48856 - DNA, 28 bp, Artificial Sequence
  Probe
gcttctgtaatgtagtggttatcacatt

SEQ ID NO: 48857 - DNA, 31 bp, Artificial Sequence; identical to SEQ ID NO: 40680
  Probe

SEQ ID NO: 48858 - DNA, 33 bp, Artificial Sequence; identical to SEQ ID NO: 6322
  Probe

SEQ ID NO: 48859 - DNA, 30 bp, Artificial Sequence; identical to SEQ ID NO: 8646
  Probe

SEQ ID NO: 48860 - DNA, 35 bp, Artificial Sequence; identical to SEQ ID NO: 1217
  Probe

SEQ ID NO: 48861 - DNA, 36 bp, Artificial Sequence; identical to SEQ ID NO: 1218
  Probe

SEQ ID NO: 48862 - DNA, 50 bp, Artificial Sequence; identical to SEQ ID NO: 21335
  Probe

SEQ ID NO: 48863 - DNA, 27 bp, Artificial Sequence
  Probe
gctttggggggttcgattccttccttt

SEQ ID NO: 48864 - DNA, 31 bp, Artificial Sequence; identical to SEQ ID NO: 6328
  Probe

SEQ ID NO: 48865 - DNA, 32 bp, Artificial Sequence; identical to SEQ ID NO: 6329
  Probe

SEQ ID NO: 48866 - DNA, 33 bp, Artificial Sequence; identical to SEQ ID NO: 6330
  Probe

SEQ ID NO: 48867 - DNA, 34 bp, Artificial Sequence; identical to SEQ ID NO: 21347
  Probe

SEQ ID NO: 48868 - DNA, 22 bp, Artificial Sequence
  Probe
ggaaagtgcacttggacgaacc

SEQ ID NO: 48869 - DNA, 24 bp, Artificial Sequence
  Probe
ggaagcgtgctgggcccataaccc

SEQ ID NO: 48870 - DNA, 27 bp, Artificial Sequence
  Probe
ggaagcgtgctgggcccataacccaga

SEQ ID NO: 48871 - DNA, 35 bp, Artificial Sequence; identical to SEQ ID NO: 1228
  Probe

SEQ ID NO: 48872 - DNA, 36 bp, Artificial Sequence; identical to SEQ ID NO: 1229
  Probe

SEQ ID NO: 48873 - DNA, 37 bp, Artificial Sequence; identical to SEQ ID NO: 6332
  Probe

SEQ ID NO: 48874 - DNA, 38 bp, Artificial Sequence; identical to SEQ ID NO: 1230
  Probe

SEQ ID NO: 48875 - DNA, 16 bp, Artificial Sequence
  Probe
ggactatgagaatcga

SEQ ID NO: 48876 - DNA, 17 bp, Artificial Sequence
  Probe
ggactatgagaatcgaa

SEQ ID NO: 48877 - DNA, 18 bp, Artificial Sequence
  Probe
ggactatgagaatcgaac

SEQ ID NO: 48878 - DNA, 19 bp, Artificial Sequence
  Probe
ggactatgagaatcgaacc

SEQ ID NO: 48879 - DNA, 20 bp, Artificial Sequence
  Probe
ggactatgagaatcgaaccc

SEQ ID NO: 48880 - DNA, 21 bp, Artificial Sequence
  Probe
ggactatgagaatcgaaccca

SEQ ID NO: 48881 - DNA, 24 bp, Artificial Sequence
  Probe
ggactatgagaatcgaacccatcc

SEQ ID NO: 48882 - DNA, 25 bp, Artificial Sequence
  Probe
ggactatgagaatcgaacccatccc

SEQ ID NO: 48883 - DNA, 27 bp, Artificial Sequence
  Probe
ggactatgagaatcgaacccatccctg

SEQ ID NO: 48884 - DNA, 28 bp, Artificial Sequence
  Probe
ggactatgagaatcgaacccatccctga

SEQ ID NO: 48885 - DNA, 30 bp, Artificial Sequence; identical to SEQ ID NO: 6337
  Probe

SEQ ID NO: 48886 - DNA, 50 bp, Artificial Sequence
  Probe
ggactctgaatccagcgatccgagttcaaatctcggtggaacctttcata

SEQ ID NO: 48887 - DNA, 41 bp, Artificial Sequence; identical to SEQ ID NO: 6341
  Probe

SEQ ID NO: 48888 - DNA, 44 bp, Artificial Sequence; identical to SEQ ID NO: 6342
  Probe

SEQ ID NO: 48889 - DNA, 45 bp, Artificial Sequence; identical to SEQ ID NO: 6343
  Probe

SEQ ID NO: 48890 - DNA, 25 bp, Artificial Sequence
  Probe
ggagaccggggttcaattccccgac

SEQ ID NO: 48891 - DNA, 28 bp, Artificial Sequence
  Probe
ggagaccggggttcaattccccgacggg

SEQ ID NO: 48892 - DNA, 29 bp, Artificial Sequence
  Probe
ggagaccggggttcaattccccgacgggg

SEQ ID NO: 48893 - DNA, 30 bp, Artificial Sequence; identical to SEQ ID NO: 1235
  Probe

SEQ ID NO: 48894 - DNA, 32 bp, Artificial Sequence; identical to SEQ ID NO: 6344
  Probe

SEQ ID NO: 48895 - DNA, 34 bp, Artificial Sequence; identical to SEQ ID NO: 6346
  Probe

SEQ ID NO: 48896 - DNA, 25 bp, Artificial Sequence
  Probe
ggagaccggggttcgattccccgac

SEQ ID NO: 48897 - DNA, 26 bp, Artificial Sequence
  Probe
ggagaccggggttcgattccccgacg

SEQ ID NO: 48898 - DNA, 32 bp, Artificial Sequence; identical to SEQ ID NO: 6348
  Probe

SEQ ID NO: 48899 - DNA, 34 bp, Artificial Sequence; identical to SEQ ID NO: 6350
  Probe

SEQ ID NO: 48900 - DNA, 33 bp, Artificial Sequence; identical to SEQ ID NO: 6351
  Probe

SEQ ID NO: 48901 - DNA, 34 bp, Artificial Sequence; identical to SEQ ID NO: 21392
  Probe

SEQ ID NO: 48902 - DNA, 34 bp, Artificial Sequence; identical to SEQ ID NO: 6352
  Probe

SEQ ID NO: 48903 - DNA, 32 bp, Artificial Sequence; identical to SEQ ID NO: 6353
  Probe

SEQ ID NO: 48904 - DNA, 33 bp, Artificial Sequence; identical to SEQ ID NO: 6354
  Probe

SEQ ID NO: 48905 - DNA, 34 bp, Artificial Sequence; identical to SEQ ID NO: 6355
  Probe

SEQ ID NO: 48906 - DNA, 34 bp, Artificial Sequence; identical to SEQ ID NO: 21401
  Probe

SEQ ID NO: 48907 - DNA, 32 bp, Artificial Sequence; identical to SEQ ID NO: 21404
  Probe

SEQ ID NO: 48908 - DNA, 29 bp, Artificial Sequence
  Probe
ggagatcctgggttcgaatcccagcggtg

SEQ ID NO: 48909 - DNA, 32 bp, Artificial Sequence; identical to SEQ ID NO: 6356
  Probe

SEQ ID NO: 48910 - DNA, 16 bp, Artificial Sequence
  Probe
ggagatgaaaaccttt

SEQ ID NO: 48911 - DNA, 18 bp, Artificial Sequence
  Probe
ggagatgaaaaccttttt

SEQ ID NO: 48912 - DNA, 20 bp, Artificial Sequence
  Probe
ggagatgaaaacctttttcc

SEQ ID NO: 48913 - DNA, 21 bp, Artificial Sequence
  Probe
ggagatgaaaacctttttcca

SEQ ID NO: 48914 - DNA, 26 bp, Artificial Sequence
  Probe
ggagatgaaaacctttttccaaggac

SEQ ID NO: 48915 - DNA, 27 bp, Artificial Sequence
  Probe
ggagatgaaaacctttttccaaggaca

SEQ ID NO: 48916 - DNA, 28 bp, Artificial Sequence
  Probe
ggagatgaaaacctttttccaaggacaa

SEQ ID NO: 48917 - DNA, 29 bp, Artificial Sequence
  Probe
ggagatgaaaacctttttccaaggacaaa

SEQ ID NO: 48918 - DNA, 30 bp, Artificial Sequence; identical to SEQ ID NO: 6362
  Probe

SEQ ID NO: 48919 - DNA, 31 bp, Artificial Sequence; identical to SEQ ID NO: 6363
  Probe

SEQ ID NO: 48920 - DNA, 22 bp, Artificial Sequence
  Probe
ggagatttcaacttaacttgac

SEQ ID NO: 48921 - DNA, 23 bp, Artificial Sequence
  Probe
ggagatttcaacttaacttgacc

SEQ ID NO: 48922 - DNA, 24 bp, Artificial Sequence
  Probe
ggagatttcaacttaacttgaccg

SEQ ID NO: 48923 - DNA, 25 bp, Artificial Sequence
  Probe
ggagatttcaacttaacttgaccgc

SEQ ID NO: 48924 - DNA, 26 bp, Artificial Sequence
  Probe
ggagatttcaacttaacttgaccgct

SEQ ID NO: 48925 - DNA, 27 bp, Artificial Sequence
  Probe
ggagatttcaacttaacttgaccgctc

SEQ ID NO: 48926 - DNA, 28 bp, Artificial Sequence
  Probe
ggagatttcaacttaacttgaccgctct

SEQ ID NO: 48927 - DNA, 29 bp, Artificial Sequence
  Probe
ggagatttcaacttaacttgaccgctctg

SEQ ID NO: 48928 - DNA, 30 bp, Artificial Sequence; identical to SEQ ID NO: 6372
  Probe

SEQ ID NO: 48929 - DNA, 31 bp, Artificial Sequence; identical to SEQ ID NO: 6373
  Probe

SEQ ID NO: 48930 - DNA, 32 bp, Artificial Sequence; identical to SEQ ID NO: 6374
  Probe

SEQ ID NO: 48931 - DNA, 33 bp, Artificial Sequence; identical to SEQ ID NO: 6375
  Probe

SEQ ID NO: 48932 - DNA, 38 bp, Artificial Sequence; identical to SEQ ID NO: 21447
  Probe

SEQ ID NO: 48933 - DNA, 39 bp, Artificial Sequence; identical to SEQ ID NO: 21448
  Probe

SEQ ID NO: 48934 - DNA, 40 bp, Artificial Sequence; identical to SEQ ID NO: 21449
  Probe

SEQ ID NO: 48935 - DNA, 41 bp, Artificial Sequence; identical to SEQ ID NO: 21450
  Probe

SEQ ID NO: 48936 - DNA, 17 bp, Artificial Sequence
  Probe
ggagcttaaaccccctt

SEQ ID NO: 48937 - DNA, 18 bp, Artificial Sequence
  Probe
ggagcttaaaccccctta

SEQ ID NO: 48938 - DNA, 26 bp, Artificial Sequence
  Probe
ggagcttaaacccccttatttctagg

SEQ ID NO: 48939 - DNA, 27 bp, Artificial Sequence
  Probe
ggagcttaaacccccttatttctagga

SEQ ID NO: 48940 - DNA, 31 bp, Artificial Sequence; identical to SEQ ID NO: 21459
  Probe

SEQ ID NO: 48941 - DNA, 34 bp, Artificial Sequence; identical to SEQ ID NO: 21460
  Probe

SEQ ID NO: 48942 - DNA, 34 bp, Artificial Sequence; identical to SEQ ID NO: 21461
  Probe

SEQ ID NO: 48943 - DNA, 29 bp, Artificial Sequence
  Probe
ggaggcgtgggttcgaatcccacttctga

SEQ ID NO: 48944 - DNA, 30 bp, Artificial Sequence
  Probe
ggaggcgtgggttcgaatcccacttctgac

SEQ ID NO: 48945 - DNA, 31 bp, Artificial Sequence; identical to SEQ ID NO: 21466
  Probe

SEQ ID NO: 48946 - DNA, 32 bp, Artificial Sequence; identical to SEQ ID NO: 21467
  Probe

SEQ ID NO: 48947 - DNA, 25 bp, Artificial Sequence
  Probe
ggagttaaagactttttctctgatt

SEQ ID NO: 48948 - DNA, 26 bp, Artificial Sequence
  Probe
ggagttaaagactttttctctgattt

SEQ ID NO: 48949 - DNA, 29 bp, Artificial Sequence
  Probe
ggatagctcagtcggtagagcatcagact

SEQ ID NO: 48950 - DNA, 31 bp, Artificial Sequence; identical to SEQ ID NO: 1252
  Probe

SEQ ID NO: 48951 - DNA, 32 bp, Artificial Sequence; identical to SEQ ID NO: 1253
  Probe

SEQ ID NO: 48952 - DNA, 50 bp, Artificial Sequence
  Probe
ggatagctcagtcggtagagcatcagacttttaatctgagggtccagggt

SEQ ID NO: 48953 - DNA, 21 bp, Artificial Sequence
  Probe
ggatcgaaaccatcctctgct

SEQ ID NO: 48954 - DNA, 25 bp, Artificial Sequence
  Probe
ggatcgaaaccatcctctgctaggt

SEQ ID NO: 48955 - DNA, 24 bp, Artificial Sequence
  Probe
ggatcgaaaccatcctctgctatc

SEQ ID NO: 48956 - DNA, 25 bp, Artificial Sequence
  Probe
ggatcgatgcccgcatcctccactc

SEQ ID NO: 48957 - DNA, 22 bp, Artificial Sequence
  Probe
ggatcgatgcccgcattctcca

SEQ ID NO: 48958 - DNA, 25 bp, Artificial Sequence
  Probe
ggatcgatgcccgcattctccatac

SEQ ID NO: 48959 - DNA, 25 bp, Artificial Sequence
  Probe
ggatggccgagtggtctaaggcgcc

SEQ ID NO: 48960 - DNA, 26 bp, Artificial Sequence
  Probe
ggatggggtgtgataggtggcacgga

SEQ ID NO: 48961 - DNA, 25 bp, Artificial Sequence
  Probe
ggatgggttcgattctcatagtcct

SEQ ID NO: 48962 - DNA, 28 bp, Artificial Sequence
  Probe
ggatgggttcgattctcatagtcctaga

SEQ ID NO: 48963 - DNA, 27 bp, Artificial Sequence
  Probe
ggattggtggtccagtggtagaattct

SEQ ID NO: 48964 - DNA, 23 bp, Artificial Sequence
  Probe
ggattgtgggttcgagtcccatc

SEQ ID NO: 48965 - DNA, 30 bp, Artificial Sequence; identical to SEQ ID NO: 40742
  Probe

SEQ ID NO: 48966 - DNA, 31 bp, Artificial Sequence
  Probe
ggattgtgggttcgagtcccatctggggtgg

SEQ ID NO: 48967 - DNA, 30 bp, Artificial Sequence
  Probe
ggattgtgggttcgagtcccatctgggtcg

SEQ ID NO: 48968 - DNA, 31 bp, Artificial Sequence
  Probe
ggattgtgggttcgagtcccatctgggtcgc

SEQ ID NO: 48969 - DNA, 27 bp, Artificial Sequence
  Probe
ggcacatgcagcgcaagtaggtctaca

SEQ ID NO: 48970 - DNA, 28 bp, Artificial Sequence
  Probe
ggcacatgcagcgcaagtaggtctacaa

SEQ ID NO: 48971 - DNA, 19 bp, Artificial Sequence
  Probe
ggcagcgatggccgagtgg

SEQ ID NO: 48972 - DNA, 21 bp, Artificial Sequence
  Probe
ggcagcgatggccgagtggtt

SEQ ID NO: 48973 - DNA, 32 bp, Artificial Sequence; identical to SEQ ID NO: 32240
  Probe

SEQ ID NO: 48974 - DNA, 33 bp, Artificial Sequence; identical to SEQ ID NO: 6396
  Probe

SEQ ID NO: 48975 - DNA, 20 bp, Artificial Sequence
  Probe
ggccaacctcctactcctca

SEQ ID NO: 48976 - DNA, 19 bp, Artificial Sequence
  Probe
ggcccaacccgtcatctac

SEQ ID NO: 48977 - DNA, 16 bp, Artificial Sequence
  Probe
ggcccataacccagag

SEQ ID NO: 48978 - DNA, 49 bp, Artificial Sequence; identical to SEQ ID NO: 40749
  Probe

SEQ ID NO: 48979 - DNA, 50 bp, Artificial Sequence; identical to SEQ ID NO: 6398
  Probe

SEQ ID NO: 48980 - DNA, 46 bp, Artificial Sequence; identical to SEQ ID NO: 40752
  Probe

SEQ ID NO: 48981 - DNA, 16 bp, Artificial Sequence
  Probe
ggcccataccccgaaa

SEQ ID NO: 48982 - DNA, 17 bp, Artificial Sequence
  Probe
ggcccataccccgaaaa

SEQ ID NO: 48983 - DNA, 19 bp, Artificial Sequence
  Probe
ggcccataccccgaaaatg

SEQ ID NO: 48984 - DNA, 20 bp, Artificial Sequence
  Probe
ggcccataccccgaaaatgt

SEQ ID NO: 48985 - DNA, 21 bp, Artificial Sequence
  Probe
ggcccataccccgaaaatgtt

SEQ ID NO: 48986 - DNA, 22 bp, Artificial Sequence
  Probe
ggcccataccccgaaaatgttg

SEQ ID NO: 48987 - DNA, 24 bp, Artificial Sequence
  Probe
ggcccataccccgaaaatgttggt

SEQ ID NO: 48988 - DNA, 25 bp, Artificial Sequence
  Probe
ggcccataccccgaaaatgttggtt

SEQ ID NO: 48989 - DNA, 26 bp, Artificial Sequence
  Probe
ggcccataccccgaaaatgttggtta

SEQ ID NO: 48990 - DNA, 28 bp, Artificial Sequence
  Probe
ggcccataccccgaaaatgttggttata

SEQ ID NO: 48991 - DNA, 29 bp, Artificial Sequence
  Probe
ggcccataccccgaaaatgttggttatac

SEQ ID NO: 48992 - DNA, 30 bp, Artificial Sequence; identical to SEQ ID NO: 6411
  Probe

SEQ ID NO: 48993 - DNA, 31 bp, Artificial Sequence; identical to SEQ ID NO: 6412
  Probe

SEQ ID NO: 48994 - DNA, 32 bp, Artificial Sequence; identical to SEQ ID NO: 6413
  Probe

SEQ ID NO: 48995 - DNA, 34 bp, Artificial Sequence; identical to SEQ ID NO: 6415
  Probe

SEQ ID NO: 48996 - DNA, 35 bp, Artificial Sequence; identical to SEQ ID NO: 6416
  Probe

SEQ ID NO: 48997 - DNA, 36 bp, Artificial Sequence; identical to SEQ ID NO: 6417
  Probe

SEQ ID NO: 48998 - DNA, 37 bp, Artificial Sequence; identical to SEQ ID NO: 6418
  Probe

SEQ ID NO: 48999 - DNA, 38 bp, Artificial Sequence; identical to SEQ ID NO: 21533
  Probe

SEQ ID NO: 49000 - DNA, 43 bp, Artificial Sequence; identical to SEQ ID NO: 6420
  Probe

SEQ ID NO: 49001 - DNA, 44 bp, Artificial Sequence; identical to SEQ ID NO: 6421
  Probe

SEQ ID NO: 49002 - DNA, 45 bp, Artificial Sequence; identical to SEQ ID NO: 6422
  Probe

SEQ ID NO: 49003 - DNA, 50 bp, Artificial Sequence
  Probe
ggcccataccccgaaaatgttggttatacccttcccgtactaattaatcc

SEQ ID NO: 49004 - DNA, 40 bp, Artificial Sequence
  Probe
ggccccaaaaattttggtgcaactccaaataaaagtaata

SEQ ID NO: 49005 - DNA, 32 bp, Artificial Sequence; identical to SEQ ID NO: 6423
  Probe

SEQ ID NO: 49006 - DNA, 33 bp, Artificial Sequence; identical to SEQ ID NO: 6424
  Probe

SEQ ID NO: 49007 - DNA, 35 bp, Artificial Sequence; identical to SEQ ID NO: 6425
  Probe

SEQ ID NO: 49008 - DNA, 36 bp, Artificial Sequence; identical to SEQ ID NO: 1260
  Probe

SEQ ID NO: 49009 - DNA, 50 bp, Artificial Sequence; identical to SEQ ID NO: 40759
  Probe

SEQ ID NO: 49010 - DNA, 23 bp, Artificial Sequence
  Probe
ggccccatggtgtaatggttagc

SEQ ID NO: 49011 - DNA, 31 bp, Artificial Sequence; identical to SEQ ID NO: 21540
  Probe

SEQ ID NO: 49012 - DNA, 34 bp, Artificial Sequence; identical to SEQ ID NO: 13771
  Probe

SEQ ID NO: 49013 - DNA, 35 bp, Artificial Sequence; identical to SEQ ID NO: 21542
  Probe

SEQ ID NO: 49014 - DNA, 36 bp, Artificial Sequence; identical to SEQ ID NO: 1264
  Probe

SEQ ID NO: 49015 - DNA, 37 bp, Artificial Sequence; identical to SEQ ID NO: 1265
  Probe

SEQ ID NO: 49016 - DNA, 50 bp, Artificial Sequence; identical to SEQ ID NO: 6427
  Probe

SEQ ID NO: 49017 - DNA, 28 bp, Artificial Sequence
  Probe
ggccccgggttcaatccccggcacctcc

SEQ ID NO: 49018 - DNA, 29 bp, Artificial Sequence
  Probe
ggccccgggttcaatccccggcatctcca

SEQ ID NO: 49019 - DNA, 32 bp, Artificial Sequence
  Probe
ggccccgggttcaatccccggcatctccagac

SEQ ID NO: 49020 - DNA, 23 bp, Artificial Sequence
  Probe
ggccccgggttcgatccccggca

SEQ ID NO: 49021 - DNA, 26 bp, Artificial Sequence
  Probe
ggccccgggttcgatccccggcatct

SEQ ID NO: 49022 - DNA, 31 bp, Artificial Sequence; identical to SEQ ID NO: 21548
  Probe

SEQ ID NO: 49023 - DNA, 32 bp, Artificial Sequence; identical to SEQ ID NO: 6430
  Probe

SEQ ID NO: 49024 - DNA, 33 bp, Artificial Sequence; identical to SEQ ID NO: 21550
  Probe

SEQ ID NO: 49025 - DNA, 34 bp, Artificial Sequence; identical to SEQ ID NO: 21551
  Probe

SEQ ID NO: 49026 - DNA, 26 bp, Artificial Sequence
  Probe
ggcccgggttcgactcccggtatggg

SEQ ID NO: 49027 - DNA, 31 bp, Artificial Sequence; identical to SEQ ID NO: 6431
  Probe

SEQ ID NO: 49028 - DNA, 42 bp, Artificial Sequence; identical to SEQ ID NO: 21557
  Probe

SEQ ID NO: 49029 - DNA, 27 bp, Artificial Sequence
  Probe
ggcccgggttcgactcccggtgtggga

SEQ ID NO: 49030 - DNA, 29 bp, Artificial Sequence
  Probe
ggcccgggttcgactcccggtgtgggaac

SEQ ID NO: 49031 - DNA, 31 bp, Artificial Sequence; identical to SEQ ID NO: 6432
  Probe

SEQ ID NO: 49032 - DNA, 27 bp, Artificial Sequence
  Probe
ggcccgggttcgattcccggtcaggga

SEQ ID NO: 49033 - DNA, 28 bp, Artificial Sequence
  Probe
ggcccgggttcgattcccggtcagggaa

SEQ ID NO: 49034 - DNA, 31 bp, Artificial Sequence; identical to SEQ ID NO: 6433
  Probe

SEQ ID NO: 49035 - DNA, 16 bp, Artificial Sequence
  Probe
ggccctatagctcagg

SEQ ID NO: 49036 - DNA, 17 bp, Artificial Sequence
  Probe
ggccctatagctcaggg

SEQ ID NO: 49037 - DNA, 18 bp, Artificial Sequence
  Probe
ggccctatagctcagggg

SEQ ID NO: 49038 - DNA, 19 bp, Artificial Sequence
  Probe
ggccctatagctcaggggt

SEQ ID NO: 49039 - DNA, 20 bp, Artificial Sequence
  Probe
ggccctatagctcaggggtt

SEQ ID NO: 49040 - DNA, 35 bp, Artificial Sequence
  Probe
ggccctatagctcaggggttagagcactggtcttg

SEQ ID NO: 49041 - DNA, 36 bp, Artificial Sequence; identical to SEQ ID NO: 1271
  Probe

SEQ ID NO: 49042 - DNA, 50 bp, Artificial Sequence; identical to SEQ ID NO: 1272
  Probe

SEQ ID NO: 49043 - DNA, 17 bp, Artificial Sequence
  Probe
ggccgcgtggcctaatg

SEQ ID NO: 49044 - DNA, 31 bp, Artificial Sequence
  Probe
ggccgcgtggcctaatggataaggcgtctga

SEQ ID NO: 49045 - DNA, 33 bp, Artificial Sequence
  Probe
ggccgcgtggcctaatggataaggcgtctgatt

SEQ ID NO: 49046 - DNA, 16 bp, Artificial Sequence
  Probe
ggccggttagctcagt

SEQ ID NO: 49047 - DNA, 19 bp, Artificial Sequence
  Probe
ggccggttagctcagttgg

SEQ ID NO: 49048 - DNA, 20 bp, Artificial Sequence
  Probe
ggccggttagctcagttggt

SEQ ID NO: 49049 - DNA, 21 bp, Artificial Sequence
  Probe
ggccggttagctcagttggta

SEQ ID NO: 49050 - DNA, 22 bp, Artificial Sequence
  Probe
ggccggttagctcagttggtaa

SEQ ID NO: 49051 - DNA, 21 bp, Artificial Sequence
  Probe
ggccggttagctcagttggtt

SEQ ID NO: 49052 - DNA, 22 bp, Artificial Sequence
  Probe
ggccggttagctcagttggtta

SEQ ID NO: 49053 - DNA, 24 bp, Artificial Sequence
  Probe
ggccggttagctcagttggttaga

SEQ ID NO: 49054 - DNA, 26 bp, Artificial Sequence
  Probe
ggccggttagctcagttggttagagc

SEQ ID NO: 49055 - DNA, 31 bp, Artificial Sequence; identical to SEQ ID NO: 40784
  Probe

SEQ ID NO: 49056 - DNA, 32 bp, Artificial Sequence; identical to SEQ ID NO: 21581
  Probe

SEQ ID NO: 49057 - DNA, 33 bp, Artificial Sequence; identical to SEQ ID NO: 6449
  Probe

SEQ ID NO: 49058 - DNA, 34 bp, Artificial Sequence; identical to SEQ ID NO: 6450
  Probe

SEQ ID NO: 49059 - DNA, 35 bp, Artificial Sequence; identical to SEQ ID NO: 21584
  Probe

SEQ ID NO: 49060 - DNA, 37 bp, Artificial Sequence
  Probe
ggccggttagctcagttggttagagcgtggtgctaat

SEQ ID NO: 49061 - DNA, 50 bp, Artificial Sequence
  Probe
ggccggttagctcagttggttagagcgtggtgctaataacgccaaggtcg

SEQ ID NO: 49062 - DNA, 30 bp, Artificial Sequence
  Probe
ggcctcgtggcgcaacggtagcgcgtctga

SEQ ID NO: 49063 - DNA, 24 bp, Artificial Sequence
  Probe
ggcgcggtggccaagtggtaaggc

SEQ ID NO: 49064 - DNA, 28 bp, Artificial Sequence
  Probe
ggcggcccgggttcgactcccggtgtgg

SEQ ID NO: 49065 - DNA, 29 bp, Artificial Sequence
  Probe
ggcggcccgggttcgactcccggtgtggg

SEQ ID NO: 49066 - DNA, 30 bp, Artificial Sequence; identical to SEQ ID NO: 1278
  Probe

SEQ ID NO: 49067 - DNA, 31 bp, Artificial Sequence; identical to SEQ ID NO: 1279
  Probe

SEQ ID NO: 49068 - DNA, 18 bp, Artificial Sequence
  Probe
ggcgtgattcataccttt

SEQ ID NO: 49069 - DNA, 19 bp, Artificial Sequence
  Probe
ggcgtgattcatacctttt

SEQ ID NO: 49070 - DNA, 16 bp, Artificial Sequence
  Probe
ggctaaatcctatata

SEQ ID NO: 49071 - DNA, 18 bp, Artificial Sequence
  Probe
ggctaaatcctatatatc

SEQ ID NO: 49072 - DNA, 24 bp, Artificial Sequence
  Probe
ggctaaatcctatatatcttaatg

SEQ ID NO: 49073 - DNA, 27 bp, Artificial Sequence
  Probe
ggctagctcagtcggtagagcatgaga

SEQ ID NO: 49074 - DNA, 28 bp, Artificial Sequence
  Probe
ggctagctcagtcggtagagcatgagac

SEQ ID NO: 49075 - DNA, 29 bp, Artificial Sequence
  Probe
ggctagctcagtcggtagagcatgagact

SEQ ID NO: 49076 - DNA, 31 bp, Artificial Sequence; identical to SEQ ID NO: 1286
  Probe

SEQ ID NO: 49077 - DNA, 28 bp, Artificial Sequence
  Probe
ggctagctcagtcggtagagcatgggac

SEQ ID NO: 49078 - DNA, 29 bp, Artificial Sequence
  Probe
ggctagctcagtcggtagagcatgggact

SEQ ID NO: 49079 - DNA, 31 bp, Artificial Sequence; identical to SEQ ID NO: 1293
  Probe

SEQ ID NO: 49080 - DNA, 32 bp, Artificial Sequence; identical to SEQ ID NO: 1294
  Probe

SEQ ID NO: 49081 - DNA, 16 bp, Artificial Sequence
  Probe
ggctcacatcacccca

SEQ ID NO: 49082 - DNA, 17 bp, Artificial Sequence
  Probe
ggctcacatcaccccat

SEQ ID NO: 49083 - DNA, 18 bp, Artificial Sequence
  Probe
ggctcacatcaccccata

SEQ ID NO: 49084 - DNA, 19 bp, Artificial Sequence
  Probe
ggctcacatcaccccataa

SEQ ID NO: 49085 - DNA, 20 bp, Artificial Sequence
  Probe
ggctcacatcaccccataaa

SEQ ID NO: 49086 - DNA, 21 bp, Artificial Sequence
  Probe
ggctcacatcaccccataaac

SEQ ID NO: 49087 - DNA, 22 bp, Artificial Sequence
  Probe
ggctcacatcaccccataaaca

SEQ ID NO: 49088 - DNA, 23 bp, Artificial Sequence
  Probe
ggctcacatcaccccataaacaa

SEQ ID NO: 49089 - DNA, 24 bp, Artificial Sequence
  Probe
ggctcacatcaccccataaacaaa

SEQ ID NO: 49090 - DNA, 25 bp, Artificial Sequence
  Probe
ggctcacatcaccccataaacaaat

SEQ ID NO: 49091 - DNA, 26 bp, Artificial Sequence
  Probe
ggctcacatcaccccataaacaaata

SEQ ID NO: 49092 - DNA, 16 bp, Artificial Sequence
  Probe
ggctccatagctcagg

SEQ ID NO: 49093 - DNA, 17 bp, Artificial Sequence
  Probe
ggctccatagctcaggg

SEQ ID NO: 49094 - DNA, 18 bp, Artificial Sequence
  Probe
ggctccatagctcagggg

SEQ ID NO: 49095 - DNA, 19 bp, Artificial Sequence
  Probe
ggctccatagctcaggggt

SEQ ID NO: 49096 - DNA, 20 bp, Artificial Sequence
  Probe
ggctccatagctcaggggtt

SEQ ID NO: 49097 - DNA, 30 bp, Artificial Sequence; identical to SEQ ID NO: 10696
  Probe

SEQ ID NO: 49098 - DNA, 31 bp, Artificial Sequence; identical to SEQ ID NO: 6482
  Probe

SEQ ID NO: 49099 - DNA, 32 bp, Artificial Sequence; identical to SEQ ID NO: 6483
  Probe

SEQ ID NO: 49100 - DNA, 33 bp, Artificial Sequence; identical to SEQ ID NO: 6484
  Probe

SEQ ID NO: 49101 - DNA, 34 bp, Artificial Sequence; identical to SEQ ID NO: 6485
  Probe

SEQ ID NO: 49102 - DNA, 36 bp, Artificial Sequence; identical to SEQ ID NO: 6487
  Probe

SEQ ID NO: 49103 - DNA, 18 bp, Artificial Sequence
  Probe
ggctccatagctcagtgg

SEQ ID NO: 49104 - DNA, 25 bp, Artificial Sequence
  Probe
ggctccatagctcagtggttagagc

SEQ ID NO: 49105 - DNA, 33 bp, Artificial Sequence; identical to SEQ ID NO: 1300
  Probe

SEQ ID NO: 49106 - DNA, 26 bp, Artificial Sequence
  Probe
ggctccgtagcttagttggttaaagc

SEQ ID NO: 49107 - DNA, 19 bp, Artificial Sequence
  Probe
ggctccgtggcgcaatgga

SEQ ID NO: 49108 - DNA, 30 bp, Artificial Sequence; identical to SEQ ID NO: 10704
  Probe

SEQ ID NO: 49109 - DNA, 31 bp, Artificial Sequence; identical to SEQ ID NO: 21644
  Probe

SEQ ID NO: 49110 - DNA, 26 bp, Artificial Sequence
  Probe
ggctccgtggcttagctggttaaagc

SEQ ID NO: 49111 - DNA, 27 bp, Artificial Sequence
  Probe
ggctcgttggtctaggggtatgattct

SEQ ID NO: 49112 - DNA, 29 bp, Artificial Sequence
  Probe
ggctcgttggtctaggggtatgattctcg

SEQ ID NO: 49113 - DNA, 30 bp, Artificial Sequence; identical to SEQ ID NO: 6496
  Probe

SEQ ID NO: 49114 - DNA, 31 bp, Artificial Sequence; identical to SEQ ID NO: 6497
  Probe

SEQ ID NO: 49115 - DNA, 32 bp, Artificial Sequence; identical to SEQ ID NO: 6498
  Probe

SEQ ID NO: 49116 - DNA, 33 bp, Artificial Sequence; identical to SEQ ID NO: 1306
  Probe

SEQ ID NO: 49117 - DNA, 33 bp, Artificial Sequence; identical to SEQ ID NO: 1307
  Probe

SEQ ID NO: 49118 - DNA, 30 bp, Artificial Sequence; identical to SEQ ID NO: 8665
  Probe

SEQ ID NO: 49119 - DNA, 32 bp, Artificial Sequence; identical to SEQ ID NO: 1308
  Probe

SEQ ID NO: 49120 - DNA, 33 bp, Artificial Sequence; identical to SEQ ID NO: 6503
  Probe

SEQ ID NO: 49121 - DNA, 31 bp, Artificial Sequence
  Probe
ggctctgtggcgcaatggatagcgcattgga

SEQ ID NO: 49122 - DNA, 32 bp, Artificial Sequence; identical to SEQ ID NO: 37060
  Probe

SEQ ID NO: 49123 - DNA, 27 bp, Artificial Sequence
  Probe
ggctgcgtgttcgaatcacgtcggggt

SEQ ID NO: 49124 - DNA, 29 bp, Artificial Sequence
  Probe
ggctgcgtgttcgaatcacgtcggggtca

SEQ ID NO: 49125 - DNA, 32 bp, Artificial Sequence; identical to SEQ ID NO: 6504
  Probe

SEQ ID NO: 49126 - DNA, 32 bp, Artificial Sequence; identical to SEQ ID NO: 6505
  Probe

SEQ ID NO: 49127 - DNA, 21 bp, Artificial Sequence
  Probe
ggctgtgatggccgagtggtt

SEQ ID NO: 49128 - DNA, 40 bp, Artificial Sequence
  Probe
ggctgttaaccgaaaggttggtggttcgagcccacccagg

SEQ ID NO: 49129 - DNA, 44 bp, Artificial Sequence
  Probe
ggctgttaaccgaaaggttggtggttcgagcccacccagggacg

SEQ ID NO: 49130 - DNA, 45 bp, Artificial Sequence
  Probe
ggctgttaaccgaaaggttggtggttcgagcccacccagggacgc

SEQ ID NO: 49131 - DNA, 50 bp, Artificial Sequence; identical to SEQ ID NO: 40844
  Probe

SEQ ID NO: 49132 - DNA, 22 bp, Artificial Sequence
  Probe
ggcttacgaccccttatttacc

SEQ ID NO: 49133 - DNA, 23 bp, Artificial Sequence
  Probe
ggcttacgaccccttatttaccg

SEQ ID NO: 49134 - DNA, 26 bp, Artificial Sequence
  Probe
gggagaccggggttcaattccccgac

SEQ ID NO: 49135 - DNA, 29 bp, Artificial Sequence
  Probe
gggagaccggggttcaattccccgacggg

SEQ ID NO: 49136 - DNA, 32 bp, Artificial Sequence; identical to SEQ ID NO: 6509
  Probe

SEQ ID NO: 49137 - DNA, 32 bp, Artificial Sequence; identical to SEQ ID NO: 21696
  Probe

SEQ ID NO: 49138 - DNA, 35 bp, Artificial Sequence; identical to SEQ ID NO: 6512
  Probe

SEQ ID NO: 49139 - DNA, 26 bp, Artificial Sequence
  Probe
gggagaccggggttcgattccccgac

SEQ ID NO: 49140 - DNA, 27 bp, Artificial Sequence
  Probe
gggagaccggggttcgattccccgacg

SEQ ID NO: 49141 - DNA, 28 bp, Artificial Sequence
  Probe
gggagaccggggttcgattccccgacgg

SEQ ID NO: 49142 - DNA, 30 bp, Artificial Sequence; identical to SEQ ID NO: 1315
  Probe

SEQ ID NO: 49143 - DNA, 33 bp, Artificial Sequence; identical to SEQ ID NO: 6516
  Probe

SEQ ID NO: 49144 - DNA, 35 bp, Artificial Sequence; identical to SEQ ID NO: 6518
  Probe

SEQ ID NO: 49145 - DNA, 33 bp, Artificial Sequence; identical to SEQ ID NO: 6519
  Probe

SEQ ID NO: 49146 - DNA, 35 bp, Artificial Sequence; identical to SEQ ID NO: 6520
  Probe

SEQ ID NO: 49147 - DNA, 35 bp, Artificial Sequence; identical to SEQ ID NO: 6521
  Probe

SEQ ID NO: 49148 - DNA, 35 bp, Artificial Sequence; identical to SEQ ID NO: 21721
  Probe

SEQ ID NO: 49149 - DNA, 36 bp, Artificial Sequence; identical to SEQ ID NO: 21722
  Probe

SEQ ID NO: 49150 - DNA, 39 bp, Artificial Sequence; identical to SEQ ID NO: 21725
  Probe

SEQ ID NO: 49151 - DNA, 40 bp, Artificial Sequence; identical to SEQ ID NO: 21726
  Probe

SEQ ID NO: 49152 - DNA, 41 bp, Artificial Sequence; identical to SEQ ID NO: 21727
  Probe

SEQ ID NO: 49153 - DNA, 37 bp, Artificial Sequence; identical to SEQ ID NO: 21739
  Probe

SEQ ID NO: 49154 - DNA, 38 bp, Artificial Sequence; identical to SEQ ID NO: 21740
  Probe

SEQ ID NO: 49155 - DNA, 39 bp, Artificial Sequence; identical to SEQ ID NO: 6522
  Probe

SEQ ID NO: 49156 - DNA, 41 bp, Artificial Sequence; identical to SEQ ID NO: 21743
  Probe

SEQ ID NO: 49157 - DNA, 42 bp, Artificial Sequence; identical to SEQ ID NO: 21744
  Probe

SEQ ID NO: 49158 - DNA, 43 bp, Artificial Sequence; identical to SEQ ID NO: 21745
  Probe

SEQ ID NO: 49159 - DNA, 32 bp, Artificial Sequence; identical to SEQ ID NO: 6526
  Probe

SEQ ID NO: 49160 - DNA, 40 bp, Artificial Sequence; identical to SEQ ID NO: 21777
  Probe

SEQ ID NO: 49161 - DNA, 50 bp, Artificial Sequence; identical to SEQ ID NO: 21782
  Probe

SEQ ID NO: 49162 - DNA, 23 bp, Artificial Sequence
  Probe
gggatcgatgcccgcatcctcca

SEQ ID NO: 49163 - DNA, 26 bp, Artificial Sequence
  Probe
gggatcgatgcccgcattctccatac

SEQ ID NO: 49164 - DNA, 22 bp, Artificial Sequence
  Probe
gggatgggttcgattctcatag

SEQ ID NO: 49165 - DNA, 23 bp, Artificial Sequence
  Probe
gggatgggttcgattctcatagt

SEQ ID NO: 49166 - DNA, 24 bp, Artificial Sequence
  Probe
gggatgggttcgattctcatagtc

SEQ ID NO: 49167 - DNA, 27 bp, Artificial Sequence
  Probe
gggatgggttcgattctcatagtccta

SEQ ID NO: 49168 - DNA, 31 bp, Artificial Sequence; identical to SEQ ID NO: 6530
  Probe

SEQ ID NO: 49169 - DNA, 24 bp, Artificial Sequence
  Probe
gggattgtgggttcgagtcccatc

SEQ ID NO: 49170 - DNA, 27 bp, Artificial Sequence
  Probe
gggattgtgggttcgagtcccatctgg

SEQ ID NO: 49171 - DNA, 28 bp, Artificial Sequence
  Probe
gggattgtgggttcgagtcccatctggg

SEQ ID NO: 49172 - DNA, 29 bp, Artificial Sequence
  Probe
gggattgtgggttcgagtcccatctgggg

SEQ ID NO: 49173 - DNA, 31 bp, Artificial Sequence; identical to SEQ ID NO: 6534
  Probe

SEQ ID NO: 49174 - DNA, 32 bp, Artificial Sequence
  Probe
gggattgtgggttcgagtcccatctggggtgg

SEQ ID NO: 49175 - DNA, 31 bp, Artificial Sequence; identical to SEQ ID NO: 6536
  Probe

SEQ ID NO: 49176 - DNA, 32 bp, Artificial Sequence
  Probe
gggattgtgggttcgagtcccatctgggtcgc

SEQ ID NO: 49177 - DNA, 19 bp, Artificial Sequence
  Probe
gggccagtggcgcaatgga

SEQ ID NO: 49178 - DNA, 33 bp, Artificial Sequence; identical to SEQ ID NO: 32392
  Probe

SEQ ID NO: 49179 - DNA, 50 bp, Artificial Sequence
  Probe
gggcccataacccagaggtcgatggatcgaaaccatcctctgctagggag

SEQ ID NO: 49180 - DNA, 50 bp, Artificial Sequence
  Probe
gggcccataacccagaggtcgatggatcgaaaccatcctctgctaggtcc

SEQ ID NO: 49181 - DNA, 49 bp, Artificial Sequence
  Probe
gggcccataacccagaggtcgatggatcgaaaccatcctctgctaggtg

SEQ ID NO: 49182 - DNA, 50 bp, Artificial Sequence; identical to SEQ ID NO: 6540
  Probe

SEQ ID NO: 49183 - DNA, 49 bp, Artificial Sequence
  Probe
gggcccataacccagaggtcgatggatcgaaaccatcctctgctatcgg

SEQ ID NO: 49184 - DNA, 50 bp, Artificial Sequence
  Probe
gggcccataacccagaggtcgatggatcgaaaccatcctctgctattttt

SEQ ID NO: 49185 - DNA, 26 bp, Artificial Sequence
  Probe
gggcccataccccgaaaatgttggtt

SEQ ID NO: 49186 - DNA, 32 bp, Artificial Sequence; identical to SEQ ID NO: 6550
  Probe

SEQ ID NO: 49187 - DNA, 36 bp, Artificial Sequence; identical to SEQ ID NO: 21810
  Probe

SEQ ID NO: 49188 - DNA, 40 bp, Artificial Sequence; identical to SEQ ID NO: 6555
  Probe

SEQ ID NO: 49189 - DNA, 43 bp, Artificial Sequence
  Probe
gggcccataccccgaaaatgttggttatacccttcccgtacta

SEQ ID NO: 49190 - DNA, 45 bp, Artificial Sequence; identical to SEQ ID NO: 6557
  Probe

SEQ ID NO: 49191 - DNA, 46 bp, Artificial Sequence; identical to SEQ ID NO: 6558
  Probe

SEQ ID NO: 49192 - DNA, 32 bp, Artificial Sequence
  Probe
gggcgtgggttcgaatcccaccgctgccaggt

SEQ ID NO: 49193 - DNA, 17 bp, Artificial Sequence
  Probe
gggctcacatcacccca

SEQ ID NO: 49194 - DNA, 19 bp, Artificial Sequence
  Probe
gggctcacatcaccccata

SEQ ID NO: 49195 - DNA, 20 bp, Artificial Sequence
  Probe
gggctcacatcaccccataa

SEQ ID NO: 49196 - DNA, 23 bp, Artificial Sequence
  Probe
gggctcacatcaccccataaaca

SEQ ID NO: 49197 - DNA, 25 bp, Artificial Sequence
  Probe
gggctcacatcaccccataaacaaa

SEQ ID NO: 49198 - DNA, 26 bp, Artificial Sequence
  Probe
gggctcacatcaccccataaacaaat

SEQ ID NO: 49199 - DNA, 20 bp, Artificial Sequence
  Probe
ggggaattagctcaaatggt

SEQ ID NO: 49200 - DNA, 25 bp, Artificial Sequence
  Probe
ggggaattagctcaaatggtagagc

SEQ ID NO: 49201 - DNA, 31 bp, Artificial Sequence
  Probe
ggggaattagctcaaatggtagagcgctcgc

SEQ ID NO: 49202 - DNA, 32 bp, Artificial Sequence
  Probe
ggggaattagctcaaatggtagagcgctcgct

SEQ ID NO: 49203 - DNA, 27 bp, Artificial Sequence
  Probe
ggggacgcgttggtggtgtagtggtga

SEQ ID NO: 49204 - DNA, 50 bp, Artificial Sequence; identical to SEQ ID NO: 21843
  Probe

SEQ ID NO: 49205 - DNA, 32 bp, Artificial Sequence; identical to SEQ ID NO: 6569
  Probe

SEQ ID NO: 49206 - DNA, 34 bp, Artificial Sequence
  Probe
ggggatatagctcaggggtagagcatttgactgc

SEQ ID NO: 49207 - DNA, 29 bp, Artificial Sequence
  Probe
ggggatgtagctcagtggtagagcgcatg

SEQ ID NO: 49208 - DNA, 33 bp, Artificial Sequence; identical to SEQ ID NO: 6572
  Probe

SEQ ID NO: 49209 - DNA, 34 bp, Artificial Sequence; identical to SEQ ID NO: 21855
  Probe

SEQ ID NO: 49210 - DNA, 35 bp, Artificial Sequence; identical to SEQ ID NO: 1339
  Probe

SEQ ID NO: 49211 - DNA, 27 bp, Artificial Sequence
  Probe
ggggatgtagctcagtggtagagcgcg

SEQ ID NO: 49212 - DNA, 29 bp, Artificial Sequence
  Probe
ggggatgtagctcagtggtagagcgcgcg

SEQ ID NO: 49213 - DNA, 33 bp, Artificial Sequence; identical to SEQ ID NO: 6573
  Probe

SEQ ID NO: 49214 - DNA, 25 bp, Artificial Sequence
  Probe
ggggattgtgggttcgagtcccatc

SEQ ID NO: 49215 - DNA, 28 bp, Artificial Sequence
  Probe
ggggattgtgggttcgagtcccatctgg

SEQ ID NO: 49216 - DNA, 31 bp, Artificial Sequence
  Probe
ggggcatagctcagtggtagagcatttgact

SEQ ID NO: 49217 - DNA, 16 bp, Artificial Sequence
  Probe
gggggattagctcaaa

SEQ ID NO: 49218 - DNA, 32 bp, Artificial Sequence; identical to SEQ ID NO: 6576
  Probe

SEQ ID NO: 49219 - DNA, 33 bp, Artificial Sequence; identical to SEQ ID NO: 6577
  Probe

SEQ ID NO: 49220 - DNA, 19 bp, Artificial Sequence
  Probe
gggggcatagctcagtggt

SEQ ID NO: 49221 - DNA, 23 bp, Artificial Sequence
  Probe
gggggcatagctcagtggtagag

SEQ ID NO: 49222 - DNA, 32 bp, Artificial Sequence
  Probe
gggggtatagctcacaggtagagcatttgact

SEQ ID NO: 49223 - DNA, 18 bp, Artificial Sequence
  Probe
gggggtatagctcagggg

SEQ ID NO: 49224 - DNA, 32 bp, Artificial Sequence; identical to SEQ ID NO: 6582
  Probe

SEQ ID NO: 49225 - DNA, 33 bp, Artificial Sequence; identical to SEQ ID NO: 21881
  Probe

SEQ ID NO: 49226 - DNA, 34 bp, Artificial Sequence
  Probe
gggggtatagctcaggggtagagcacttgactgc

SEQ ID NO: 49227 - DNA, 27 bp, Artificial Sequence
  Probe
gggggtatagctcaggggtagagcatt

SEQ ID NO: 49228 - DNA, 35 bp, Artificial Sequence
  Probe
gggggtatagctcaggggtagagcatttgactgca

SEQ ID NO: 49229 - DNA, 35 bp, Artificial Sequence; identical to SEQ ID NO: 6586
  Probe

SEQ ID NO: 49230 - DNA, 16 bp, Artificial Sequence
  Probe
gggggtatagctcagt

SEQ ID NO: 49231 - DNA, 17 bp, Artificial Sequence
  Probe
gggggtatagctcagtg

SEQ ID NO: 49232 - DNA, 18 bp, Artificial Sequence
  Probe
gggggtatagctcagtgg

SEQ ID NO: 49233 - DNA, 32 bp, Artificial Sequence; identical to SEQ ID NO: 21896
  Probe

SEQ ID NO: 49234 - DNA, 36 bp, Artificial Sequence; identical to SEQ ID NO: 13863
  Probe

SEQ ID NO: 49235 - DNA, 19 bp, Artificial Sequence
  Probe
gggggtatagctcagtggt

SEQ ID NO: 49236 - DNA, 20 bp, Artificial Sequence
  Probe
gggggtatagctcagtggta

SEQ ID NO: 49237 - DNA, 21 bp, Artificial Sequence
  Probe
gggggtatagctcagtggtag

SEQ ID NO: 49238 - DNA, 22 bp, Artificial Sequence
  Probe
gggggtatagctcagtggtaga

SEQ ID NO: 49239 - DNA, 23 bp, Artificial Sequence
  Probe
gggggtatagctcagtggtagag

SEQ ID NO: 49240 - DNA, 24 bp, Artificial Sequence
  Probe
gggggtatagctcagtggtagagc

SEQ ID NO: 49241 - DNA, 25 bp, Artificial Sequence
  Probe
gggggtatagctcagtggtagagca

SEQ ID NO: 49242 - DNA, 27 bp, Artificial Sequence
  Probe
gggggtatagctcagtggtagagcatt

SEQ ID NO: 49243 - DNA, 28 bp, Artificial Sequence
  Probe
gggggtatagctcagtggtagagcattt

SEQ ID NO: 49244 - DNA, 29 bp, Artificial Sequence
  Probe
gggggtatagctcagtggtagagcatttg

SEQ ID NO: 49245 - DNA, 30 bp, Artificial Sequence; identical to SEQ ID NO: 6598
  Probe

SEQ ID NO: 49246 - DNA, 31 bp, Artificial Sequence; identical to SEQ ID NO: 6599
  Probe

SEQ ID NO: 49247 - DNA, 32 bp, Artificial Sequence; identical to SEQ ID NO: 6600
  Probe

SEQ ID NO: 49248 - DNA, 33 bp, Artificial Sequence; identical to SEQ ID NO: 6601
  Probe

SEQ ID NO: 49249 - DNA, 34 bp, Artificial Sequence; identical to SEQ ID NO: 6602
  Probe

SEQ ID NO: 49250 - DNA, 35 bp, Artificial Sequence; identical to SEQ ID NO: 6603
  Probe

SEQ ID NO: 49251 - DNA, 31 bp, Artificial Sequence
  Probe
gggggtatagctcagtggtagagcgcgtgct

SEQ ID NO: 49252 - DNA, 32 bp, Artificial Sequence
  Probe
gggggtatagcttaggggtagagcatttgact

SEQ ID NO: 49253 - DNA, 32 bp, Artificial Sequence; identical to SEQ ID NO: 6607
  Probe

SEQ ID NO: 49254 - DNA, 17 bp, Artificial Sequence
  Probe
gggggtgtagctcagtg

SEQ ID NO: 49255 - DNA, 18 bp, Artificial Sequence
  Probe
gggggtgtagctcagtgg

SEQ ID NO: 49256 - DNA, 20 bp, Artificial Sequence
  Probe
gggggtgtagctcagtggta

SEQ ID NO: 49257 - DNA, 22 bp, Artificial Sequence
  Probe
gggggtgtagctcagtggtaga

SEQ ID NO: 49258 - DNA, 30 bp, Artificial Sequence; identical to SEQ ID NO: 21919
  Probe

SEQ ID NO: 49259 - DNA, 31 bp, Artificial Sequence; identical to SEQ ID NO: 6611
  Probe

SEQ ID NO: 49260 - DNA, 32 bp, Artificial Sequence; identical to SEQ ID NO: 6612
  Probe

SEQ ID NO: 49261 - DNA, 33 bp, Artificial Sequence; identical to SEQ ID NO: 21922
  Probe

SEQ ID NO: 49262 - DNA, 35 bp, Artificial Sequence
  Probe
gggggtgtagctcagtggtagagcatttgactgca

SEQ ID NO: 49263 - DNA, 30 bp, Artificial Sequence; identical to SEQ ID NO: 40932
  Probe

SEQ ID NO: 49264 - DNA, 31 bp, Artificial Sequence; identical to SEQ ID NO: 6615
  Probe

SEQ ID NO: 49265 - DNA, 32 bp, Artificial Sequence
  Probe
gggggtgtagctcagtggtagagcgcatgctt

SEQ ID NO: 49266 - DNA, 33 bp, Artificial Sequence
  Probe
gggggtgtagctcagtggtagagcgcatgcttt

SEQ ID NO: 49267 - DNA, 27 bp, Artificial Sequence
  Probe
gggggtgtagctcagtggtagagcgcg

SEQ ID NO: 49268 - DNA, 33 bp, Artificial Sequence; identical to SEQ ID NO: 6616
  Probe

SEQ ID NO: 49269 - DNA, 33 bp, Artificial Sequence; identical to SEQ ID NO: 6617
  Probe

SEQ ID NO: 49270 - DNA, 35 bp, Artificial Sequence
  Probe
gggggtgtagctcagtggtagagcgcgtgcttcgc

SEQ ID NO: 49271 - DNA, 26 bp, Artificial Sequence
  Probe
gggggttcgattccttccttttttgt

SEQ ID NO: 49272 - DNA, 27 bp, Artificial Sequence
  Probe
gggggttcgattccttccttttttgtc

SEQ ID NO: 49273 - DNA, 31 bp, Artificial Sequence; identical to SEQ ID NO: 6619
  Probe

SEQ ID NO: 49274 - DNA, 32 bp, Artificial Sequence; identical to SEQ ID NO: 6620
  Probe

SEQ ID NO: 49275 - DNA, 33 bp, Artificial Sequence; identical to SEQ ID NO: 6621
  Probe

SEQ ID NO: 49276 - DNA, 16 bp, Artificial Sequence
  Probe
ggggtatgattctcgc

SEQ ID NO: 49277 - DNA, 17 bp, Artificial Sequence
  Probe
ggggtatgattctcgct

SEQ ID NO: 49278 - DNA, 29 bp, Artificial Sequence
  Probe
ggggtgtagctcagtggtagagcgcgtgc

SEQ ID NO: 49279 - DNA, 23 bp, Artificial Sequence
  Probe
ggggtgtgataggtggcacggag

SEQ ID NO: 49280 - DNA, 24 bp, Artificial Sequence
  Probe
ggggtgtgataggtggcacggaga

SEQ ID NO: 49281 - DNA, 21 bp, Artificial Sequence
  Probe
ggggttaggcctctttttacc

SEQ ID NO: 49282 - DNA, 24 bp, Artificial Sequence
  Probe
ggggttaggcctctttttaccagc

SEQ ID NO: 49283 - DNA, 25 bp, Artificial Sequence
  Probe
ggggttaggcctctttttaccagct

SEQ ID NO: 49284 - DNA, 26 bp, Artificial Sequence
  Probe
ggggttcgattccccgacggggagac

SEQ ID NO: 49285 - DNA, 26 bp, Artificial Sequence
  Probe
ggggttcgattccccgacggggaggc

SEQ ID NO: 49286 - DNA, 27 bp, Artificial Sequence
  Probe
ggggttcgattccccgacggggaggca

SEQ ID NO: 49287 - DNA, 20 bp, Artificial Sequence
  Probe
ggggttttgcagtccttagc

SEQ ID NO: 49288 - DNA, 21 bp, Artificial Sequence
  Probe
ggggttttgcagtccttagct

SEQ ID NO: 49289 - DNA, 31 bp, Artificial Sequence; identical to SEQ ID NO: 6644
  Probe

SEQ ID NO: 49290 - DNA, 32 bp, Artificial Sequence; identical to SEQ ID NO: 6645
  Probe

SEQ ID NO: 49291 - DNA, 33 bp, Artificial Sequence; identical to SEQ ID NO: 6646
  Probe

SEQ ID NO: 49292 - DNA, 16 bp, Artificial Sequence
  Probe
gggtatgattctcgct

SEQ ID NO: 49293 - DNA, 28 bp, Artificial Sequence
  Probe
gggtccagggttcaagtccctgttcggg

SEQ ID NO: 49294 - DNA, 33 bp, Artificial Sequence; identical to SEQ ID NO: 21973
  Probe

SEQ ID NO: 49295 - DNA, 16 bp, Artificial Sequence
  Probe
gggtccccggtagctc

SEQ ID NO: 49296 - DNA, 17 bp, Artificial Sequence
  Probe
gggtccccggtagctcg

SEQ ID NO: 49297 - DNA, 31 bp, Artificial Sequence
  Probe
gggtcgcgagttcaaatctcgctggggcctc

SEQ ID NO: 49298 - DNA, 33 bp, Artificial Sequence
  Probe
gggtcgcgagttcaattctcgctggggcctgtg

SEQ ID NO: 49299 - DNA, 28 bp, Artificial Sequence
  Probe
gggtcgtgggttcgagccccacgttggg

SEQ ID NO: 49300 - DNA, 30 bp, Artificial Sequence; identical to SEQ ID NO: 10861
  Probe

SEQ ID NO: 49301 - DNA, 35 bp, Artificial Sequence
  Probe
gggtgcttagctgttaactaagtgtttgtgggttt

SEQ ID NO: 49302 - DNA, 22 bp, Artificial Sequence
  Probe
gggtgtgataggtggcacggag

SEQ ID NO: 49303 - DNA, 20 bp, Artificial Sequence
  Probe
gggttaggcctctttttacc

SEQ ID NO: 49304 - DNA, 23 bp, Artificial Sequence
  Probe
gggttaggcctctttttaccagc

SEQ ID NO: 49305 - DNA, 24 bp, Artificial Sequence
  Probe
gggttaggcctctttttaccagct

SEQ ID NO: 49306 - DNA, 25 bp, Artificial Sequence
  Probe
gggttcaatccccggcacctccacc

SEQ ID NO: 49307 - DNA, 26 bp, Artificial Sequence
  Probe
gggttcaattccccgacggggaggtg

SEQ ID NO: 49308 - DNA, 26 bp, Artificial Sequence
  Probe
gggttcaattcccggtcagggaacca

SEQ ID NO: 49309 - DNA, 25 bp, Artificial Sequence
  Probe
gggttcgaatcccaccgctgccagg

SEQ ID NO: 49310 - DNA, 26 bp, Artificial Sequence
  Probe
gggttcgaatcccaccgctgccaggt

SEQ ID NO: 49311 - DNA, 26 bp, Artificial Sequence
  Probe
gggttcgaatcccacttctgacacaa

SEQ ID NO: 49312 - DNA, 26 bp, Artificial Sequence
  Probe
gggttcgaatcccagcggggccttac

SEQ ID NO: 49313 - DNA, 26 bp, Artificial Sequence
  Probe
gggttcgaatcccagcggggccttag

SEQ ID NO: 49314 - DNA, 26 bp, Artificial Sequence
  Probe
gggttcgaatcccagcggtgcctccg

SEQ ID NO: 49315 - DNA, 26 bp, Artificial Sequence
  Probe
gggttcgaatcccagcggtgccttta

SEQ ID NO: 49316 - DNA, 26 bp, Artificial Sequence
  Probe
gggttcgactcccggtatgggaacaa

SEQ ID NO: 49317 - DNA, 26 bp, Artificial Sequence
  Probe
gggttcgactcccggtgtgggaacgc

SEQ ID NO: 49318 - DNA, 26 bp, Artificial Sequence
  Probe
gggttcgagccccacgttgggcggca

SEQ ID NO: 49319 - DNA, 26 bp, Artificial Sequence
  Probe
gggttcgagtcccacccggggtaaag

SEQ ID NO: 49320 - DNA, 26 bp, Artificial Sequence
  Probe
gggttcgagtcccatctgggtcgcgt

SEQ ID NO: 49321 - DNA, 21 bp, Artificial Sequence
  Probe
gggttcgagtcccttcgtggt

SEQ ID NO: 49322 - DNA, 26 bp, Artificial Sequence
  Probe
gggttcgagtcccttcgtggtcgttg

SEQ ID NO: 49323 - DNA, 26 bp, Artificial Sequence
  Probe
gggttcgatccccagcatctccagtg

SEQ ID NO: 49324 - DNA, 26 bp, Artificial Sequence
  Probe
gggttcgatccccggcatctccattg

SEQ ID NO: 49325 - DNA, 26 bp, Artificial Sequence
  Probe
gggttcgatccccgtacgggccactg

SEQ ID NO: 49326 - DNA, 26 bp, Artificial Sequence
  Probe
gggttcgatccccgtactggccacgt

SEQ ID NO: 49327 - DNA, 22 bp, Artificial Sequence
  Probe
gggttcgattccccgacgggga

SEQ ID NO: 49328 - DNA, 23 bp, Artificial Sequence
  Probe
gggttcgattccccgacggggag

SEQ ID NO: 49329 - DNA, 24 bp, Artificial Sequence
  Probe
gggttcgattccccgacggggaga

SEQ ID NO: 49330 - DNA, 25 bp, Artificial Sequence
  Probe
gggttcgattccccgacggggagac

SEQ ID NO: 49331 - DNA, 24 bp, Artificial Sequence
  Probe
gggttcgattccccgacggggagg

SEQ ID NO: 49332 - DNA, 25 bp, Artificial Sequence
  Probe
gggttcgattccccgacggggaggc

SEQ ID NO: 49333 - DNA, 26 bp, Artificial Sequence
  Probe
gggttcgattccccgacggggaggca

SEQ ID NO: 49334 - DNA, 26 bp, Artificial Sequence
  Probe
gggttcgattcccggccaacgcaagt

SEQ ID NO: 49335 - DNA, 26 bp, Artificial Sequence
  Probe
gggttcgattcccggccaacgcagtg

SEQ ID NO: 49336 - DNA, 23 bp, Artificial Sequence
  Probe
gggttcgattcccggccaatgca

SEQ ID NO: 49337 - DNA, 26 bp, Artificial Sequence
  Probe
gggttcgattcccggccaatgcacga

SEQ ID NO: 49338 - DNA, 26 bp, Artificial Sequence
  Probe
gggttcgattcccggccaatgcagca

SEQ ID NO: 49339 - DNA, 25 bp, Artificial Sequence
  Probe
gggttcgattccttccttttttgtc

SEQ ID NO: 49340 - DNA, 20 bp, Artificial Sequence
  Probe
gggttcgattctcatagtcc

SEQ ID NO: 49341 - DNA, 21 bp, Artificial Sequence
  Probe
gggttcgattctcatagtcct

SEQ ID NO: 49342 - DNA, 25 bp, Artificial Sequence
  Probe
gggttcgattctcatagtcctagaa

SEQ ID NO: 49343 - DNA, 26 bp, Artificial Sequence
  Probe
gggttcgattctcatagtcctagaaa

SEQ ID NO: 49344 - DNA, 24 bp, Artificial Sequence
  Probe
ggtaaaatggctgagtgaagcatt

SEQ ID NO: 49345 - DNA, 25 bp, Artificial Sequence
  Probe
ggtaaaatggctgagtgaagcattg

SEQ ID NO: 49346 - DNA, 28 bp, Artificial Sequence
  Probe
ggtaaaatggctgagtgaagcattggac

SEQ ID NO: 49347 - DNA, 29 bp, Artificial Sequence
  Probe
ggtaaaatggctgagtgaagcattggact

SEQ ID NO: 49348 - DNA, 30 bp, Artificial Sequence; identical to SEQ ID NO: 6688
  Probe

SEQ ID NO: 49349 - DNA, 31 bp, Artificial Sequence; identical to SEQ ID NO: 6689
  Probe

SEQ ID NO: 49350 - DNA, 32 bp, Artificial Sequence; identical to SEQ ID NO: 6690
  Probe

SEQ ID NO: 49351 - DNA, 33 bp, Artificial Sequence; identical to SEQ ID NO: 6691
  Probe

SEQ ID NO: 49352 - DNA, 34 bp, Artificial Sequence; identical to SEQ ID NO: 6692
  Probe

SEQ ID NO: 49353 - DNA, 35 bp, Artificial Sequence; identical to SEQ ID NO: 6693
  Probe

SEQ ID NO: 49354 - DNA, 36 bp, Artificial Sequence; identical to SEQ ID NO: 6694
  Probe

SEQ ID NO: 49355 - DNA, 37 bp, Artificial Sequence; identical to SEQ ID NO: 6695
  Probe

SEQ ID NO: 49356 - DNA, 38 bp, Artificial Sequence; identical to SEQ ID NO: 6696
  Probe

SEQ ID NO: 49357 - DNA, 40 bp, Artificial Sequence; identical to SEQ ID NO: 22052
  Probe

SEQ ID NO: 49358 - DNA, 24 bp, Artificial Sequence
  Probe
ggtaatcgcataaaacttaaaact

SEQ ID NO: 49359 - DNA, 29 bp, Artificial Sequence
  Probe
ggtaatcgcataaaacttaaaactttaca

SEQ ID NO: 49360 - DNA, 32 bp, Artificial Sequence; identical to SEQ ID NO: 22055
  Probe

SEQ ID NO: 49361 - DNA, 35 bp, Artificial Sequence
  Probe
ggtaatcgcataaaacttaaaactttacagtcaga

SEQ ID NO: 49362 - DNA, 36 bp, Artificial Sequence; identical to SEQ ID NO: 32531
  Probe

SEQ ID NO: 49363 - DNA, 41 bp, Artificial Sequence
  Probe
ggtaatcgcataaaacttaaaactttacagtcagaggttca

SEQ ID NO: 49364 - DNA, 32 bp, Artificial Sequence; identical to SEQ ID NO: 6703
  Probe

SEQ ID NO: 49365 - DNA, 37 bp, Artificial Sequence; identical to SEQ ID NO: 22066
  Probe

SEQ ID NO: 49366 - DNA, 50 bp, Artificial Sequence
  Probe
ggtagagcatgagactcttaatctcagggtcgtgggttcgagccccacgt

SEQ ID NO: 49367 - DNA, 50 bp, Artificial Sequence
  Probe
ggtagagcatgggactcttaatcccagggtcgtgggttcgagccccacgt

SEQ ID NO: 49368 - DNA, 50 bp, Artificial Sequence
  Probe
ggtagagcgcatgctttgcacgtatgaggccccgggttcaatccccggca

SEQ ID NO: 49369 - DNA, 24 bp, Artificial Sequence
  Probe
ggtagcgtggccgagcggtctaag

SEQ ID NO: 49370 - DNA, 25 bp, Artificial Sequence
  Probe
ggtagcgtggccgagcggtctaagg

SEQ ID NO: 49371 - DNA, 26 bp, Artificial Sequence
  Probe
ggtagcgtggccgagcggtctaaggc

SEQ ID NO: 49372 - DNA, 32 bp, Artificial Sequence
  Probe
ggtagcgtggccgagcggtctaaggcgctgga

SEQ ID NO: 49373 - DNA, 35 bp, Artificial Sequence; identical to SEQ ID NO: 22078
  Probe

SEQ ID NO: 49374 - DNA, 50 bp, Artificial Sequence
  Probe
ggtagcgtggccgagcggtctaaggcgctggattaaggctccagtctctt

SEQ ID NO: 49375 - DNA, 50 bp, Artificial Sequence
  Probe
ggtagcgtggccgagcggtctaaggcgctggatttaggctccagtctctt

SEQ ID NO: 49376 - DNA, 18 bp, Artificial Sequence
  Probe
ggtagcgtggccgagtgg

SEQ ID NO: 49377 - DNA, 21 bp, Artificial Sequence
  Probe
ggtagcgtggccgagtggtct

SEQ ID NO: 49378 - DNA, 22 bp, Artificial Sequence
  Probe
ggtagcgtggccgagtggtcta

SEQ ID NO: 49379 - DNA, 24 bp, Artificial Sequence
  Probe
ggtagcgtggccgagtggtctaag

SEQ ID NO: 49380 - DNA, 34 bp, Artificial Sequence; identical to SEQ ID NO: 6712
  Probe

SEQ ID NO: 49381 - DNA, 26 bp, Artificial Sequence
  Probe
ggtagcgtggccgagtggtctaaggc

SEQ ID NO: 49382 - DNA, 33 bp, Artificial Sequence
  Probe
ggtagcgtggccgagtggtctaaggcgctggat

SEQ ID NO: 49383 - DNA, 16 bp, Artificial Sequence
  Probe
ggtagtgtggccgagc

SEQ ID NO: 49384 - DNA, 25 bp, Artificial Sequence
  Probe
ggtagtgtggccgagcggtctaagg

SEQ ID NO: 49385 - DNA, 35 bp, Artificial Sequence
  Probe
ggtagtgtggccgagcggtctaaggcgctggattt

SEQ ID NO: 49386 - DNA, 41 bp, Artificial Sequence; identical to SEQ ID NO: 22102
  Probe

SEQ ID NO: 49387 - DNA, 32 bp, Artificial Sequence; identical to SEQ ID NO: 13915
  Probe

SEQ ID NO: 49388 - DNA, 33 bp, Artificial Sequence; identical to SEQ ID NO: 6726
  Probe

SEQ ID NO: 49389 - DNA, 33 bp, Artificial Sequence; identical to SEQ ID NO: 6728
  Probe

SEQ ID NO: 49390 - DNA, 33 bp, Artificial Sequence; identical to SEQ ID NO: 1407
  Probe

SEQ ID NO: 49391 - DNA, 33 bp, Artificial Sequence; identical to SEQ ID NO: 1408
  Probe

SEQ ID NO: 49392 - DNA, 27 bp, Artificial Sequence
  Probe
ggtcagctaaataagctatcgggccca

SEQ ID NO: 49393 - DNA, 29 bp, Artificial Sequence
  Probe
ggtcagctaaataagctatcgggcccata

SEQ ID NO: 49394 - DNA, 30 bp, Artificial Sequence; identical to SEQ ID NO: 6735
  Probe

SEQ ID NO: 49395 - DNA, 40 bp, Artificial Sequence; identical to SEQ ID NO: 6741
  Probe

SEQ ID NO: 49396 - DNA, 41 bp, Artificial Sequence; identical to SEQ ID NO: 6742
  Probe

SEQ ID NO: 49397 - DNA, 42 bp, Artificial Sequence; identical to SEQ ID NO: 6743
  Probe

SEQ ID NO: 49398 - DNA, 43 bp, Artificial Sequence; identical to SEQ ID NO: 6744
  Probe

SEQ ID NO: 49399 - DNA, 44 bp, Artificial Sequence; identical to SEQ ID NO: 6745
  Probe

SEQ ID NO: 49400 - DNA, 45 bp, Artificial Sequence; identical to SEQ ID NO: 6746
  Probe

SEQ ID NO: 49401 - DNA, 46 bp, Artificial Sequence; identical to SEQ ID NO: 6747
  Probe

SEQ ID NO: 49402 - DNA, 50 bp, Artificial Sequence; identical to SEQ ID NO: 1410
  Probe

SEQ ID NO: 49403 - DNA, 29 bp, Artificial Sequence
  Probe
ggtccagggttcaagtccctgttcgggcg

SEQ ID NO: 49404 - DNA, 31 bp, Artificial Sequence; identical to SEQ ID NO: 22145
  Probe

SEQ ID NO: 49405 - DNA, 32 bp, Artificial Sequence; identical to SEQ ID NO: 1414
  Probe

SEQ ID NO: 49406 - DNA, 33 bp, Artificial Sequence; identical to SEQ ID NO: 1415
  Probe

SEQ ID NO: 49407 - DNA, 50 bp, Artificial Sequence; identical to SEQ ID NO: 32589
  Probe

SEQ ID NO: 49408 - DNA, 50 bp, Artificial Sequence; identical to SEQ ID NO: 1417
  Probe

SEQ ID NO: 49409 - DNA, 26 bp, Artificial Sequence
  Probe
ggtcccgggttcaaatcccggacgag

SEQ ID NO: 49410 - DNA, 32 bp, Artificial Sequence; identical to SEQ ID NO: 22148
  Probe

SEQ ID NO: 49411 - DNA, 32 bp, Artificial Sequence; identical to SEQ ID NO: 6752
  Probe

SEQ ID NO: 49412 - DNA, 29 bp, Artificial Sequence
  Probe
ggtcccgggttcgatccccagcatctcca

SEQ ID NO: 49413 - DNA, 32 bp, Artificial Sequence; identical to SEQ ID NO: 22153
  Probe

SEQ ID NO: 49414 - DNA, 36 bp, Artificial Sequence; identical to SEQ ID NO: 22154
  Probe

SEQ ID NO: 49415 - DNA, 21 bp, Artificial Sequence
  Probe
ggtcctagcctttctattagc

SEQ ID NO: 49416 - DNA, 27 bp, Artificial Sequence
  Probe
ggtcctgagttcgaacctcagaggggg

SEQ ID NO: 49417 - DNA, 32 bp, Artificial Sequence
  Probe
ggtcctgagttcgaacctcagagggggcagct

SEQ ID NO: 49418 - DNA, 26 bp, Artificial Sequence
  Probe
ggtcctgggttcgagccccagtggaa

SEQ ID NO: 49419 - DNA, 29 bp, Artificial Sequence
  Probe
ggtcctgggttcgagccccagtggaacca

SEQ ID NO: 49420 - DNA, 32 bp, Artificial Sequence; identical to SEQ ID NO: 6754
  Probe

SEQ ID NO: 49421 - DNA, 28 bp, Artificial Sequence
  Probe
ggtcgcgagttcaaatctcgctggggcc

SEQ ID NO: 49422 - DNA, 29 bp, Artificial Sequence
  Probe
ggtcgcgagttcaaatctcgctggggcct

SEQ ID NO: 49423 - DNA, 30 bp, Artificial Sequence
  Probe
ggtcgcgagttcaaatctcgctggggcctc

SEQ ID NO: 49424 - DNA, 32 bp, Artificial Sequence
  Probe
ggtcgcgagttcaattctcgctggggcctgtg

SEQ ID NO: 49425 - DNA, 32 bp, Artificial Sequence; identical to SEQ ID NO: 6757
  Probe

SEQ ID NO: 49426 - DNA, 32 bp, Artificial Sequence; identical to SEQ ID NO: 6758
  Probe

SEQ ID NO: 49427 - DNA, 29 bp, Artificial Sequence
  Probe
ggtcgctggttcgattccggctcgaagga

SEQ ID NO: 49428 - DNA, 31 bp, Artificial Sequence; identical to SEQ ID NO: 22170
  Probe

SEQ ID NO: 49429 - DNA, 32 bp, Artificial Sequence; identical to SEQ ID NO: 22171
  Probe

SEQ ID NO: 49430 - DNA, 29 bp, Artificial Sequence
  Probe
ggtcgtgggttcgagccccacgttgggcg

SEQ ID NO: 49431 - DNA, 16 bp, Artificial Sequence
  Probe
ggtcgtggttgtagtc

SEQ ID NO: 49432 - DNA, 17 bp, Artificial Sequence
  Probe
ggtcgtggttgtagtcc

SEQ ID NO: 49433 - DNA, 19 bp, Artificial Sequence
  Probe
ggtcgtggttgtagtccgt

SEQ ID NO: 49434 - DNA, 27 bp, Artificial Sequence
  Probe
ggtcgtggttgtagtccgtgcgagaat

SEQ ID NO: 49435 - DNA, 29 bp, Artificial Sequence
  Probe
ggtcgtggttgtagtccgtgcgagaataa

SEQ ID NO: 49436 - DNA, 31 bp, Artificial Sequence; identical to SEQ ID NO: 6765
  Probe

SEQ ID NO: 49437 - DNA, 29 bp, Artificial Sequence
  Probe
ggtctagtggttaggattcggcgctctca

SEQ ID NO: 49438 - DNA, 33 bp, Artificial Sequence; identical to SEQ ID NO: 13931
  Probe

SEQ ID NO: 49439 - DNA, 35 bp, Artificial Sequence; identical to SEQ ID NO: 22191
  Probe

SEQ ID NO: 49440 - DNA, 33 bp, Artificial Sequence; identical to SEQ ID NO: 22199
  Probe

SEQ ID NO: 49441 - DNA, 50 bp, Artificial Sequence; identical to SEQ ID NO: 40995
  Probe

SEQ ID NO: 49442 - DNA, 27 bp, Artificial Sequence
  Probe
ggtgctaataacgccaaggtcgcgggt

SEQ ID NO: 49443 - DNA, 46 bp, Artificial Sequence
  Probe
ggtgcttagctgttaactaagtgtttgtgggtttaagtcccattgg

SEQ ID NO: 49444 - DNA, 50 bp, Artificial Sequence; identical to SEQ ID NO: 6773
  Probe

SEQ ID NO: 49445 - DNA, 26 bp, Artificial Sequence
  Probe
ggtggagttaaagactttttctctga

SEQ ID NO: 49446 - DNA, 28 bp, Artificial Sequence
  Probe
ggtggagttaaagactttttctctgatt

SEQ ID NO: 49447 - DNA, 29 bp, Artificial Sequence
  Probe
ggtggagttaaagactttttctctgattt

SEQ ID NO: 49448 - DNA, 31 bp, Artificial Sequence; identical to SEQ ID NO: 13938
  Probe

SEQ ID NO: 49449 - DNA, 34 bp, Artificial Sequence; identical to SEQ ID NO: 22217
  Probe

SEQ ID NO: 49450 - DNA, 26 bp, Artificial Sequence
  Probe
ggtggttcagtggtagaattctcgcc

SEQ ID NO: 49451 - DNA, 27 bp, Artificial Sequence
  Probe
ggtgtagctcagtggtagagcgcgtgc

SEQ ID NO: 49452 - DNA, 22 bp, Artificial Sequence
  Probe
ggtgtagtggtatcatgcaaga

SEQ ID NO: 49453 - DNA, 33 bp, Artificial Sequence; identical to SEQ ID NO: 22249
  Probe

SEQ ID NO: 49454 - DNA, 35 bp, Artificial Sequence; identical to SEQ ID NO: 13946
  Probe

SEQ ID NO: 49455 - DNA, 36 bp, Artificial Sequence; identical to SEQ ID NO: 13947
  Probe

SEQ ID NO: 49456 - DNA, 35 bp, Artificial Sequence; identical to SEQ ID NO: 13948
  Probe

SEQ ID NO: 49457 - DNA, 17 bp, Artificial Sequence
  Probe
ggttaggattcggcgct

SEQ ID NO: 49458 - DNA, 22 bp, Artificial Sequence
  Probe
ggttaggcctctttttaccagc

SEQ ID NO: 49459 - DNA, 23 bp, Artificial Sequence
  Probe
ggttaggcctctttttaccagct

SEQ ID NO: 49460 - DNA, 18 bp, Artificial Sequence
  Probe
ggttatacccttcccgta

SEQ ID NO: 49461 - DNA, 20 bp, Artificial Sequence
  Probe
ggttatacccttcccgtact

SEQ ID NO: 49462 - DNA, 21 bp, Artificial Sequence
  Probe
ggttatacccttcccgtacta

SEQ ID NO: 49463 - DNA, 22 bp, Artificial Sequence
  Probe
ggttatacccttcccgtactaa

SEQ ID NO: 49464 - DNA, 23 bp, Artificial Sequence
  Probe
ggttcaaatcccggacgagcccc

SEQ ID NO: 49465 - DNA, 25 bp, Artificial Sequence
  Probe
ggttcaaatcccggacgagccccct

SEQ ID NO: 49466 - DNA, 22 bp, Artificial Sequence
  Probe
ggttcaaatccgggtgccccct

SEQ ID NO: 49467 - DNA, 23 bp, Artificial Sequence
  Probe
ggttcaaatccgggtgccccctc

SEQ ID NO: 49468 - DNA, 25 bp, Artificial Sequence
  Probe
ggttcaaatccgggtgccccctcaa

SEQ ID NO: 49469 - DNA, 25 bp, Artificial Sequence
  Probe
ggttcaagtccctgttcgggcggca

SEQ ID NO: 49470 - DNA, 25 bp, Artificial Sequence
  Probe
ggttcaattccccgacggggaggtg

SEQ ID NO: 49471 - DNA, 25 bp, Artificial Sequence
  Probe
ggttcaattcccggtcagggaacca

SEQ ID NO: 49472 - DNA, 25 bp, Artificial Sequence
  Probe
ggttcaattcctcttcttaacaaca

SEQ ID NO: 49473 - DNA, 24 bp, Artificial Sequence
  Probe
ggttcagtggtagaattctcgcct

SEQ ID NO: 49474 - DNA, 25 bp, Artificial Sequence
  Probe
ggttcagtggtagaattctcgcctg

SEQ ID NO: 49475 - DNA, 27 bp, Artificial Sequence
  Probe
ggttcagtggtagaattctcgcctgcc

SEQ ID NO: 49476 - DNA, 20 bp, Artificial Sequence
  Probe
ggttccatagtgtagcggtt

SEQ ID NO: 49477 - DNA, 21 bp, Artificial Sequence
  Probe
ggttccatagtgtagcggtta

SEQ ID NO: 49478 - DNA, 22 bp, Artificial Sequence
  Probe
ggttccatagtgtagcggttat

SEQ ID NO: 49479 - DNA, 24 bp, Artificial Sequence
  Probe
ggttccatagtgtagcggttatca

SEQ ID NO: 49480 - DNA, 25 bp, Artificial Sequence
  Probe
ggttccatagtgtagcggttatcac

SEQ ID NO: 49481 - DNA, 26 bp, Artificial Sequence
  Probe
ggttccatagtgtagcggttatcacg

SEQ ID NO: 49482 - DNA, 29 bp, Artificial Sequence
  Probe
ggttccatagtgtagcggttatcacgtct

SEQ ID NO: 49483 - DNA, 30 bp, Artificial Sequence; identical to SEQ ID NO: 8720
  Probe

SEQ ID NO: 49484 - DNA, 35 bp, Artificial Sequence; identical to SEQ ID NO: 22300
  Probe

SEQ ID NO: 49485 - DNA, 36 bp, Artificial Sequence; identical to SEQ ID NO: 1436
  Probe

SEQ ID NO: 49486 - DNA, 40 bp, Artificial Sequence; identical to SEQ ID NO: 22303
  Probe

SEQ ID NO: 49487 - DNA, 49 bp, Artificial Sequence
  Probe
ggttccatagtgtagcggttatcacgtctgctttacacgcagaaggtcc

SEQ ID NO: 49488 - DNA, 16 bp, Artificial Sequence
  Probe
ggttccatagtgtagt

SEQ ID NO: 49489 - DNA, 17 bp, Artificial Sequence
  Probe
ggttccatagtgtagtg

SEQ ID NO: 49490 - DNA, 18 bp, Artificial Sequence
  Probe
ggttccatagtgtagtgg

SEQ ID NO: 49491 - DNA, 19 bp, Artificial Sequence
  Probe
ggttccatagtgtagtggt

SEQ ID NO: 49492 - DNA, 20 bp, Artificial Sequence
  Probe
ggttccatagtgtagtggtt

SEQ ID NO: 49493 - DNA, 21 bp, Artificial Sequence
  Probe
ggttccatagtgtagtggtta

SEQ ID NO: 49494 - DNA, 26 bp, Artificial Sequence
  Probe
ggttccatagtgtagtggttatcaca

SEQ ID NO: 49495 - DNA, 28 bp, Artificial Sequence
  Probe
ggttccatagtgtagtggttatcacatc

SEQ ID NO: 49496 - DNA, 30 bp, Artificial Sequence; identical to SEQ ID NO: 11085
  Probe

SEQ ID NO: 49497 - DNA, 50 bp, Artificial Sequence; identical to SEQ ID NO: 13981
  Probe

SEQ ID NO: 49498 - DNA, 27 bp, Artificial Sequence
  Probe
ggttccatagtgtagtggttatcacgt

SEQ ID NO: 49499 - DNA, 35 bp, Artificial Sequence; identical to SEQ ID NO: 6817
  Probe

SEQ ID NO: 49500 - DNA, 37 bp, Artificial Sequence; identical to SEQ ID NO: 6818
  Probe

SEQ ID NO: 49501 - DNA, 38 bp, Artificial Sequence; identical to SEQ ID NO: 22313
  Probe

SEQ ID NO: 49502 - DNA, 40 bp, Artificial Sequence; identical to SEQ ID NO: 13994
  Probe

SEQ ID NO: 49503 - DNA, 23 bp, Artificial Sequence
  Probe
ggttccatggtgtaatggttagc

SEQ ID NO: 49504 - DNA, 30 bp, Artificial Sequence; identical to SEQ ID NO: 6826
  Probe

SEQ ID NO: 49505 - DNA, 31 bp, Artificial Sequence; identical to SEQ ID NO: 22321
  Probe

SEQ ID NO: 49506 - DNA, 34 bp, Artificial Sequence; identical to SEQ ID NO: 1459
  Probe

SEQ ID NO: 49507 - DNA, 27 bp, Artificial Sequence
  Probe
ggttccgggttcgagtcccggcggagt

SEQ ID NO: 49508 - DNA, 25 bp, Artificial Sequence
  Probe
ggttcgaaaccgggcggaaacacct

SEQ ID NO: 49509 - DNA, 25 bp, Artificial Sequence
  Probe
ggttcgaaccccgtccgtgcctgat

SEQ ID NO: 49510 - DNA, 24 bp, Artificial Sequence
  Probe
ggttcgaatcccaccgctgccaca

SEQ ID NO: 49511 - DNA, 25 bp, Artificial Sequence
  Probe
ggttcgaatcccaccgctgccacac

SEQ ID NO: 49512 - DNA, 25 bp, Artificial Sequence
  Probe
ggttcgaatcccaccgctgccaggt

SEQ ID NO: 49513 - DNA, 22 bp, Artificial Sequence
  Probe
ggttcgaatcccactcctgaca

SEQ ID NO: 49514 - DNA, 22 bp, Artificial Sequence
  Probe
ggttcgaatcccacttctgaca

SEQ ID NO: 49515 - DNA, 24 bp, Artificial Sequence
  Probe
ggttcgaatcccacttctgacaca

SEQ ID NO: 49516 - DNA, 25 bp, Artificial Sequence
  Probe
ggttcgaatcccacttctgacacaa

SEQ ID NO: 49517 - DNA, 22 bp, Artificial Sequence
  Probe
ggttcgaatcccagcggggcct

SEQ ID NO: 49518 - DNA, 23 bp, Artificial Sequence
  Probe
ggttcgaatcccagcggggcctg

SEQ ID NO: 49519 - DNA, 23 bp, Artificial Sequence
  Probe
ggttcgaatcccagcggggcctt

SEQ ID NO: 49520 - DNA, 22 bp, Artificial Sequence
  Probe
ggttcgaatcccagcggtgcct

SEQ ID NO: 49521 - DNA, 25 bp, Artificial Sequence
  Probe
ggttcgaatcccagcggtgcctccg

SEQ ID NO: 49522 - DNA, 20 bp, Artificial Sequence
  Probe
ggttcgaatcccatcctcgt

SEQ ID NO: 49523 - DNA, 23 bp, Artificial Sequence
  Probe
ggttcgaatcccatcctcgtcgc

SEQ ID NO: 49524 - DNA, 24 bp, Artificial Sequence
  Probe
ggttcgaatcccatcctcgtcgct

SEQ ID NO: 49525 - DNA, 23 bp, Artificial Sequence
  Probe
ggttcgaatcctgccgactacga

SEQ ID NO: 49526 - DNA, 23 bp, Artificial Sequence
  Probe
ggttcgaatcctgccgactacgg

SEQ ID NO: 49527 - DNA, 25 bp, Artificial Sequence
  Probe
ggttcgaatcctgccgactacggca

SEQ ID NO: 49528 - DNA, 23 bp, Artificial Sequence
  Probe
ggttcgaatcctgccgactacgt

SEQ ID NO: 49529 - DNA, 25 bp, Artificial Sequence
  Probe
ggttcgaatcctgccgactacgtca

SEQ ID NO: 49530 - DNA, 25 bp, Artificial Sequence
  Probe
ggttcgaatcctgctcacagcgtca

SEQ ID NO: 49531 - DNA, 25 bp, Artificial Sequence
  Probe
ggttcgactcccggtatgggaacaa

SEQ ID NO: 49532 - DNA, 20 bp, Artificial Sequence
  Probe
ggttcgagcccacccaggga

SEQ ID NO: 49533 - DNA, 24 bp, Artificial Sequence
  Probe
ggttcgagcccacccagggacgcc

SEQ ID NO: 49534 - DNA, 25 bp, Artificial Sequence
  Probe
ggttcgagcccacccagggacgcct

SEQ ID NO: 49535 - DNA, 25 bp, Artificial Sequence
  Probe
ggttcgagccccacgttgggcggca

SEQ ID NO: 49536 - DNA, 24 bp, Artificial Sequence
  Probe
ggttcgagtcccatctggggtggc

SEQ ID NO: 49537 - DNA, 24 bp, Artificial Sequence
  Probe
ggttcgagtcccatctgggtcgcg

SEQ ID NO: 49538 - DNA, 25 bp, Artificial Sequence
  Probe
ggttcgagtcccatctgggtcgcgt

SEQ ID NO: 49539 - DNA, 20 bp, Artificial Sequence
  Probe
ggttcgagtcccttcgtggt

SEQ ID NO: 49540 - DNA, 24 bp, Artificial Sequence
  Probe
ggttcgagtcccttcgtggtcgtc

SEQ ID NO: 49541 - DNA, 25 bp, Artificial Sequence
  Probe
ggttcgagtcccttcgtggtcgttg

SEQ ID NO: 49542 - DNA, 22 bp, Artificial Sequence
  Probe
ggttcgatccccagcatctcca

SEQ ID NO: 49543 - DNA, 25 bp, Artificial Sequence
  Probe
ggttcgatccccagcatctccagtg

SEQ ID NO: 49544 - DNA, 25 bp, Artificial Sequence
  Probe
ggttcgatccccggcatctccattg

SEQ ID NO: 49545 - DNA, 25 bp, Artificial Sequence
  Probe
ggttcgatccccgtacgggccacga

SEQ ID NO: 49546 - DNA, 25 bp, Artificial Sequence
  Probe
ggttcgatccccgtactggccacgt

SEQ ID NO: 49547 - DNA, 25 bp, Artificial Sequence
  Probe
ggttcgatcccgggcggaaacaggt

SEQ ID NO: 49548 - DNA, 23 bp, Artificial Sequence
  Probe
ggttcgattccccgacggggaga

SEQ ID NO: 49549 - DNA, 24 bp, Artificial Sequence
  Probe
ggttcgattccccgacggggagac

SEQ ID NO: 49550 - DNA, 23 bp, Artificial Sequence
  Probe
ggttcgattccccgacggggagg

SEQ ID NO: 49551 - DNA, 24 bp, Artificial Sequence
  Probe
ggttcgattccccgacggggaggc

SEQ ID NO: 49552 - DNA, 25 bp, Artificial Sequence
  Probe
ggttcgattccccgacggggaggca

SEQ ID NO: 49553 - DNA, 22 bp, Artificial Sequence
  Probe
ggttcgattcccggccaatgca

SEQ ID NO: 49554 - DNA, 25 bp, Artificial Sequence
  Probe
ggttcgattcccggccaatgcacga

SEQ ID NO: 49555 - DNA, 25 bp, Artificial Sequence
  Probe
ggttcgattcccggccaatgcagca

SEQ ID NO: 49556 - DNA, 25 bp, Artificial Sequence
  Probe
ggttcgattcccgggcggcgcactt

SEQ ID NO: 49557 - DNA, 24 bp, Artificial Sequence
  Probe
ggttcgattccttccttttttgtc

SEQ ID NO: 49558 - DNA, 23 bp, Artificial Sequence
  Probe
ggttcgattctcatagtcctaga

SEQ ID NO: 49559 - DNA, 24 bp, Artificial Sequence
  Probe
ggttcgattctcatagtcctagaa

SEQ ID NO: 49560 - DNA, 25 bp, Artificial Sequence
  Probe
ggttcgattctcatagtcctagaaa

SEQ ID NO: 49561 - DNA, 32 bp, Artificial Sequence
  Probe
ggttgcgtgttcaaatcacgtcggggtcaaca

SEQ ID NO: 49562 - DNA, 50 bp, Artificial Sequence
  Probe
ggttggcttgaaaccagctttggggggttcgattccttccttttttgtct

SEQ ID NO: 49563 - DNA, 30 bp, Artificial Sequence; identical to SEQ ID NO: 11143
  Probe

SEQ ID NO: 49564 - DNA, 16 bp, Artificial Sequence
  Probe
ggttgtagtccgtgcg

SEQ ID NO: 49565 - DNA, 18 bp, Artificial Sequence
  Probe
ggttgtagtccgtgcgag

SEQ ID NO: 49566 - DNA, 20 bp, Artificial Sequence
  Probe
ggttgtagtccgtgcgagaa

SEQ ID NO: 49567 - DNA, 21 bp, Artificial Sequence
  Probe
ggttgtagtccgtgcgagaat

SEQ ID NO: 49568 - DNA, 22 bp, Artificial Sequence
  Probe
ggttgtagtccgtgcgagaata

SEQ ID NO: 49569 - DNA, 25 bp, Artificial Sequence
  Probe
ggttgtagtccgtgcgagaataatg

SEQ ID NO: 49570 - DNA, 29 bp, Artificial Sequence
  Probe
ggttgtgagttcgagcctcacctggagca

SEQ ID NO: 49571 - DNA, 32 bp, Artificial Sequence
  Probe
ggttgtgagttcgagcctcacctggagcattg

SEQ ID NO: 49572 - DNA, 19 bp, Artificial Sequence
  Probe
ggtttaagtcccattggtc

SEQ ID NO: 49573 - DNA, 20 bp, Artificial Sequence
  Probe
ggtttaagtcccattggtct

SEQ ID NO: 49574 - DNA, 24 bp, Artificial Sequence
  Probe
ggtttaagtcccattggtctagta

SEQ ID NO: 49575 - DNA, 32 bp, Artificial Sequence; identical to SEQ ID NO: 41092
  Probe

SEQ ID NO: 49576 - DNA, 34 bp, Artificial Sequence; identical to SEQ ID NO: 22371
  Probe

SEQ ID NO: 49577 - DNA, 26 bp, Artificial Sequence
  Probe
ggtttggtcctagcctttctattagc

SEQ ID NO: 49578 - DNA, 29 bp, Artificial Sequence
  Probe
ggtttttcatatcattggtcgtggttgta

SEQ ID NO: 49579 - DNA, 33 bp, Artificial Sequence; identical to SEQ ID NO: 6869
  Probe

SEQ ID NO: 49580 - DNA, 35 bp, Artificial Sequence; identical to SEQ ID NO: 32770
  Probe

SEQ ID NO: 49581 - DNA, 37 bp, Artificial Sequence; identical to SEQ ID NO: 32771
  Probe

SEQ ID NO: 49582 - DNA, 38 bp, Artificial Sequence; identical to SEQ ID NO: 6871
  Probe

SEQ ID NO: 49583 - DNA, 41 bp, Artificial Sequence; identical to SEQ ID NO: 25537
  Probe

SEQ ID NO: 49584 - DNA, 42 bp, Artificial Sequence; identical to SEQ ID NO: 25538
  Probe

SEQ ID NO: 49585 - DNA, 44 bp, Artificial Sequence; identical to SEQ ID NO: 32776
  Probe

SEQ ID NO: 49586 - DNA, 45 bp, Artificial Sequence
  Probe
ggtttttcatatcattggtcgtggttgtagtccgtgcgagaataa

SEQ ID NO: 49587 - DNA, 46 bp, Artificial Sequence; identical to SEQ ID NO: 32777
  Probe

SEQ ID NO: 49588 - DNA, 50 bp, Artificial Sequence; identical to SEQ ID NO: 6872
  Probe

SEQ ID NO: 49589 - DNA, 39 bp, Artificial Sequence
  Probe
gtaaacaggagatcctgggttcgaatcccagcggtgcct

SEQ ID NO: 49590 - DNA, 42 bp, Artificial Sequence; identical to SEQ ID NO: 6874
  Probe

SEQ ID NO: 49591 - DNA, 42 bp, Artificial Sequence; identical to SEQ ID NO: 22391
  Probe

SEQ ID NO: 49592 - DNA, 42 bp, Artificial Sequence; identical to SEQ ID NO: 6876
  Probe

SEQ ID NO: 49593 - DNA, 32 bp, Artificial Sequence; identical to SEQ ID NO: 6877
  Probe

SEQ ID NO: 49594 - DNA, 34 bp, Artificial Sequence; identical to SEQ ID NO: 1464
  Probe

SEQ ID NO: 49595 - DNA, 36 bp, Artificial Sequence; identical to SEQ ID NO: 6879
  Probe

SEQ ID NO: 49596 - DNA, 37 bp, Artificial Sequence; identical to SEQ ID NO: 6880
  Probe

SEQ ID NO: 49597 - DNA, 36 bp, Artificial Sequence; identical to SEQ ID NO: 22401
  Probe

SEQ ID NO: 49598 - DNA, 42 bp, Artificial Sequence; identical to SEQ ID NO: 6884
  Probe

SEQ ID NO: 49599 - DNA, 45 bp, Artificial Sequence; identical to SEQ ID NO: 6886
  Probe

SEQ ID NO: 49600 - DNA, 30 bp, Artificial Sequence; identical to SEQ ID NO: 6891
  Probe

SEQ ID NO: 49601 - DNA, 31 bp, Artificial Sequence; identical to SEQ ID NO: 6892
  Probe

SEQ ID NO: 49602 - DNA, 33 bp, Artificial Sequence; identical to SEQ ID NO: 6894
  Probe

SEQ ID NO: 49603 - DNA, 34 bp, Artificial Sequence; identical to SEQ ID NO: 6895
  Probe

SEQ ID NO: 49604 - DNA, 36 bp, Artificial Sequence; identical to SEQ ID NO: 6897
  Probe

SEQ ID NO: 49605 - DNA, 43 bp, Artificial Sequence; identical to SEQ ID NO: 6903
  Probe

SEQ ID NO: 49606 - DNA, 44 bp, Artificial Sequence; identical to SEQ ID NO: 6904
  Probe

SEQ ID NO: 49607 - DNA, 45 bp, Artificial Sequence; identical to SEQ ID NO: 6905
  Probe

SEQ ID NO: 49608 - DNA, 46 bp, Artificial Sequence; identical to SEQ ID NO: 6906
  Probe

SEQ ID NO: 49609 - DNA, 50 bp, Artificial Sequence; identical to SEQ ID NO: 6907
  Probe

SEQ ID NO: 49610 - DNA, 32 bp, Artificial Sequence; identical to SEQ ID NO: 22424
  Probe

SEQ ID NO: 49611 - DNA, 16 bp, Artificial Sequence
  Probe
gtaccgttaacttcca

SEQ ID NO: 49612 - DNA, 26 bp, Artificial Sequence
  Probe
gtaccgttaacttccaattaactagt

SEQ ID NO: 49613 - DNA, 27 bp, Artificial Sequence
  Probe
gtaccgttaacttccaattaactagtt

SEQ ID NO: 49614 - DNA, 32 bp, Artificial Sequence; identical to SEQ ID NO: 22428
  Probe

SEQ ID NO: 49615 - DNA, 36 bp, Artificial Sequence; identical to SEQ ID NO: 22429
  Probe

SEQ ID NO: 49616 - DNA, 50 bp, Artificial Sequence; identical to SEQ ID NO: 1465
  Probe

SEQ ID NO: 49617 - DNA, 38 bp, Artificial Sequence; identical to SEQ ID NO: 6914
  Probe

SEQ ID NO: 49618 - DNA, 35 bp, Artificial Sequence; identical to SEQ ID NO: 22441
  Probe

SEQ ID NO: 49619 - DNA, 50 bp, Artificial Sequence; identical to SEQ ID NO: 22442
  Probe

SEQ ID NO: 49620 - DNA, 50 bp, Artificial Sequence
  Probe
gtagagcatgagactcttaatctcagggtcgtgggttcgagccccacgtt

SEQ ID NO: 49621 - DNA, 50 bp, Artificial Sequence
  Probe
gtagagcatgggactcttaatcccagggtcgtgggttcgagccccacgtt

SEQ ID NO: 49622 - DNA, 32 bp, Artificial Sequence; identical to SEQ ID NO: 22449
  Probe

SEQ ID NO: 49623 - DNA, 27 bp, Artificial Sequence
  Probe
gtagctcagtggtagagcgcatgcttt

SEQ ID NO: 49624 - DNA, 19 bp, Artificial Sequence
  Probe
gtagtccgtgcgagaataa

SEQ ID NO: 49625 - DNA, 21 bp, Artificial Sequence
  Probe
gtagtccgtgcgagaataatg

SEQ ID NO: 49626 - DNA, 16 bp, Artificial Sequence
  Probe
gtagtcgtggccgagt

SEQ ID NO: 49627 - DNA, 18 bp, Artificial Sequence
  Probe
gtagtcgtggccgagtgg

SEQ ID NO: 49628 - DNA, 25 bp, Artificial Sequence
  Probe
gtagtcgtggccgagtggttaaggc

SEQ ID NO: 49629 - DNA, 17 bp, Artificial Sequence
  Probe
gtagtggttatcacgtt

SEQ ID NO: 49630 - DNA, 26 bp, Artificial Sequence
  Probe
gtagtgtagtggttatcacgttcgcc

SEQ ID NO: 49631 - DNA, 50 bp, Artificial Sequence
  Probe
gtagtgtagtggttatcacgttcgcctcacacgcgaaaggtccccggttc

SEQ ID NO: 49632 - DNA, 22 bp, Artificial Sequence
  Probe
gtatagtggtgagtatccccgc

SEQ ID NO: 49633 - DNA, 26 bp, Artificial Sequence
  Probe
gtatagtggtgagtatccccgcctgt

SEQ ID NO: 49634 - DNA, 50 bp, Artificial Sequence; identical to SEQ ID NO: 41131
  Probe

SEQ ID NO: 49635 - DNA, 38 bp, Artificial Sequence; identical to SEQ ID NO: 22501
  Probe

SEQ ID NO: 49636 - DNA, 38 bp, Artificial Sequence; identical to SEQ ID NO: 6928
  Probe

SEQ ID NO: 49637 - DNA, 32 bp, Artificial Sequence
  Probe
gtcaaagttaaattataggctaaatcctatat

SEQ ID NO: 49638 - DNA, 33 bp, Artificial Sequence; identical to SEQ ID NO: 6938
  Probe

SEQ ID NO: 49639 - DNA, 35 bp, Artificial Sequence
  Probe
gtcaaagttaaattataggctaaatcctatatatc

SEQ ID NO: 49640 - DNA, 36 bp, Artificial Sequence; identical to SEQ ID NO: 22531
  Probe

SEQ ID NO: 49641 - DNA, 39 bp, Artificial Sequence
  Probe
gtcaaagttaaattataggctaaatcctatatatcttaa

SEQ ID NO: 49642 - DNA, 40 bp, Artificial Sequence; identical to SEQ ID NO: 22533
  Probe

SEQ ID NO: 49643 - DNA, 41 bp, Artificial Sequence; identical to SEQ ID NO: 22534
  Probe

SEQ ID NO: 49644 - DNA, 43 bp, Artificial Sequence; identical to SEQ ID NO: 22535
  Probe

SEQ ID NO: 49645 - DNA, 44 bp, Artificial Sequence
  Probe
gtcaaagttaaattataggctaaatcctatatatcttaatggca

SEQ ID NO: 49646 - DNA, 21 bp, Artificial Sequence
  Probe
gtcacgcgggagaccggggtt

SEQ ID NO: 49647 - DNA, 42 bp, Artificial Sequence; identical to SEQ ID NO: 6945
  Probe

SEQ ID NO: 49648 - DNA, 33 bp, Artificial Sequence; identical to SEQ ID NO: 14031
  Probe

SEQ ID NO: 49649 - DNA, 35 bp, Artificial Sequence; identical to SEQ ID NO: 14033
  Probe

SEQ ID NO: 49650 - DNA, 36 bp, Artificial Sequence; identical to SEQ ID NO: 14034
  Probe

SEQ ID NO: 49651 - DNA, 40 bp, Artificial Sequence; identical to SEQ ID NO: 6946
  Probe

SEQ ID NO: 49652 - DNA, 50 bp, Artificial Sequence; identical to SEQ ID NO: 41148
  Probe

SEQ ID NO: 49653 - DNA, 42 bp, Artificial Sequence; identical to SEQ ID NO: 22552
  Probe

SEQ ID NO: 49654 - DNA, 42 bp, Artificial Sequence; identical to SEQ ID NO: 22553
  Probe

SEQ ID NO: 49655 - DNA, 40 bp, Artificial Sequence; identical to SEQ ID NO: 6948
  Probe

SEQ ID NO: 49656 - DNA, 42 bp, Artificial Sequence; identical to SEQ ID NO: 6950
  Probe

SEQ ID NO: 49657 - DNA, 50 bp, Artificial Sequence; identical to SEQ ID NO: 6952
  Probe

SEQ ID NO: 49658 - DNA, 45 bp, Artificial Sequence
  Probe
gtcacgcgggagaccggggttcgattccccgacggggaggccggg

SEQ ID NO: 49659 - DNA, 16 bp, Artificial Sequence
  Probe
gtcacggtggccgagt

SEQ ID NO: 49660 - DNA, 18 bp, Artificial Sequence
  Probe
gtcacggtggccgagtgg

SEQ ID NO: 49661 - DNA, 22 bp, Artificial Sequence
  Probe
gtcagaggttcaattcctcttc

SEQ ID NO: 49662 - DNA, 24 bp, Artificial Sequence
  Probe
gtcagaggttcaattcctcttctt

SEQ ID NO: 49663 - DNA, 28 bp, Artificial Sequence
  Probe
gtcagaggttcaattcctcttcttaaca

SEQ ID NO: 49664 - DNA, 30 bp, Artificial Sequence; identical to SEQ ID NO: 22564
  Probe

SEQ ID NO: 49665 - DNA, 31 bp, Artificial Sequence; identical to SEQ ID NO: 6959
  Probe

SEQ ID NO: 49666 - DNA, 26 bp, Artificial Sequence
  Probe
gtcagctaaataagctatcgggccca

SEQ ID NO: 49667 - DNA, 27 bp, Artificial Sequence
  Probe
gtcagctaaataagctatcgggcccat

SEQ ID NO: 49668 - DNA, 28 bp, Artificial Sequence
  Probe
gtcagctaaataagctatcgggcccata

SEQ ID NO: 49669 - DNA, 29 bp, Artificial Sequence
  Probe
gtcagctaaataagctatcgggcccatac

SEQ ID NO: 49670 - DNA, 32 bp, Artificial Sequence; identical to SEQ ID NO: 6965
  Probe

SEQ ID NO: 49671 - DNA, 37 bp, Artificial Sequence; identical to SEQ ID NO: 6968
  Probe

SEQ ID NO: 49672 - DNA, 38 bp, Artificial Sequence; identical to SEQ ID NO: 6969
  Probe

SEQ ID NO: 49673 - DNA, 39 bp, Artificial Sequence; identical to SEQ ID NO: 6970
  Probe

SEQ ID NO: 49674 - DNA, 40 bp, Artificial Sequence; identical to SEQ ID NO: 6971
  Probe

SEQ ID NO: 49675 - DNA, 41 bp, Artificial Sequence; identical to SEQ ID NO: 6972
  Probe

SEQ ID NO: 49676 - DNA, 42 bp, Artificial Sequence
  Probe
gtcagctaaataagctatcgggcccataccccgaaaatgttg

SEQ ID NO: 49677 - DNA, 43 bp, Artificial Sequence; identical to SEQ ID NO: 6973
  Probe

SEQ ID NO: 49678 - DNA, 44 bp, Artificial Sequence; identical to SEQ ID NO: 6974
  Probe

SEQ ID NO: 49679 - DNA, 45 bp, Artificial Sequence; identical to SEQ ID NO: 6975
  Probe

SEQ ID NO: 49680 - DNA, 23 bp, Artificial Sequence
  Probe
gtcagctgtttttcctaaccgga

SEQ ID NO: 49681 - DNA, 16 bp, Artificial Sequence
  Probe
gtcaggatggccgagc

SEQ ID NO: 49682 - DNA, 17 bp, Artificial Sequence
  Probe
gtcaggatggccgagcg

SEQ ID NO: 49683 - DNA, 18 bp, Artificial Sequence
  Probe
gtcaggatggccgagcgg

SEQ ID NO: 49684 - DNA, 19 bp, Artificial Sequence
  Probe
gtcaggatggccgagcggt

SEQ ID NO: 49685 - DNA, 20 bp, Artificial Sequence
  Probe
gtcaggatggccgagcggtc

SEQ ID NO: 49686 - DNA, 21 bp, Artificial Sequence
  Probe
gtcaggatggccgagcggtct

SEQ ID NO: 49687 - DNA, 22 bp, Artificial Sequence
  Probe
gtcaggatggccgagcggtcta

SEQ ID NO: 49688 - DNA, 23 bp, Artificial Sequence
  Probe
gtcaggatggccgagcggtctaa

SEQ ID NO: 49689 - DNA, 24 bp, Artificial Sequence
  Probe
gtcaggatggccgagcggtctaag

SEQ ID NO: 49690 - DNA, 25 bp, Artificial Sequence
  Probe
gtcaggatggccgagcggtctaagg

SEQ ID NO: 49691 - DNA, 32 bp, Artificial Sequence; identical to SEQ ID NO: 6990
  Probe

SEQ ID NO: 49692 - DNA, 34 bp, Artificial Sequence; identical to SEQ ID NO: 1479
  Probe

SEQ ID NO: 49693 - DNA, 35 bp, Artificial Sequence; identical to SEQ ID NO: 1480
  Probe

SEQ ID NO: 49694 - DNA, 16 bp, Artificial Sequence
  Probe
gtcaggatggccgagt

SEQ ID NO: 49695 - DNA, 18 bp, Artificial Sequence
  Probe
gtcaggatggccgagtgg

SEQ ID NO: 49696 - DNA, 20 bp, Artificial Sequence
  Probe
gtcaggatggccgagtggtc

SEQ ID NO: 49697 - DNA, 21 bp, Artificial Sequence
  Probe
gtcaggatggccgagtggtct

SEQ ID NO: 49698 - DNA, 22 bp, Artificial Sequence
  Probe
gtcaggatggccgagtggtcta

SEQ ID NO: 49699 - DNA, 26 bp, Artificial Sequence
  Probe
gtcaggatggccgagtggtctaaggc

SEQ ID NO: 49700 - DNA, 34 bp, Artificial Sequence; identical to SEQ ID NO: 22602
  Probe

SEQ ID NO: 49701 - DNA, 35 bp, Artificial Sequence; identical to SEQ ID NO: 22603
  Probe

SEQ ID NO: 49702 - DNA, 22 bp, Artificial Sequence
  Probe
gtcatgggtggttgcgttttgg

SEQ ID NO: 49703 - DNA, 28 bp, Artificial Sequence
  Probe
gtccagggttcaagtccctgttcgggcg

SEQ ID NO: 49704 - DNA, 30 bp, Artificial Sequence; identical to SEQ ID NO: 22618
  Probe

SEQ ID NO: 49705 - DNA, 31 bp, Artificial Sequence; identical to SEQ ID NO: 7002
  Probe

SEQ ID NO: 49706 - DNA, 31 bp, Artificial Sequence; identical to SEQ ID NO: 22620
  Probe

SEQ ID NO: 49707 - DNA, 32 bp, Artificial Sequence
  Probe
gtcccgggttcgatccccagcatctccagtgt

SEQ ID NO: 49708 - DNA, 33 bp, Artificial Sequence; identical to SEQ ID NO: 22621
  Probe

SEQ ID NO: 49709 - DNA, 34 bp, Artificial Sequence; identical to SEQ ID NO: 22622
  Probe

SEQ ID NO: 49710 - DNA, 35 bp, Artificial Sequence; identical to SEQ ID NO: 22623
  Probe

SEQ ID NO: 49711 - DNA, 36 bp, Artificial Sequence; identical to SEQ ID NO: 22624
  Probe

SEQ ID NO: 49712 - DNA, 29 bp, Artificial Sequence
  Probe
gtccgcgtgggttcgaaccccactcctgg

SEQ ID NO: 49713 - DNA, 20 bp, Artificial Sequence
  Probe
gtcctagcctttctattagc

SEQ ID NO: 49714 - DNA, 31 bp, Artificial Sequence
  Probe
gtcctgagttcgaacctcagagggggcagct

SEQ ID NO: 49715 - DNA, 26 bp, Artificial Sequence
  Probe
gtccttggaaaaaggttttcatctcc

SEQ ID NO: 49716 - DNA, 27 bp, Artificial Sequence
  Probe
gtccttggaaaaaggttttcatctccg

SEQ ID NO: 49717 - DNA, 17 bp, Artificial Sequence
  Probe
gtccttgtagtataaac

SEQ ID NO: 49718 - DNA, 19 bp, Artificial Sequence
  Probe
gtccttgtagtataaacta

SEQ ID NO: 49719 - DNA, 22 bp, Artificial Sequence
  Probe
gtccttgtagtataaactaata

SEQ ID NO: 49720 - DNA, 23 bp, Artificial Sequence
  Probe
gtccttgtagtataaactaatac

SEQ ID NO: 49721 - DNA, 24 bp, Artificial Sequence
  Probe
gtccttgtagtataaactaataca

SEQ ID NO: 49722 - DNA, 25 bp, Artificial Sequence
  Probe
gtccttgtagtataaactaatacac

SEQ ID NO: 49723 - DNA, 32 bp, Artificial Sequence; identical to SEQ ID NO: 7010
  Probe

SEQ ID NO: 49724 - DNA, 33 bp, Artificial Sequence; identical to SEQ ID NO: 7011
  Probe

SEQ ID NO: 49725 - DNA, 34 bp, Artificial Sequence; identical to SEQ ID NO: 7012
  Probe

SEQ ID NO: 49726 - DNA, 39 bp, Artificial Sequence; identical to SEQ ID NO: 7014
  Probe

SEQ ID NO: 49727 - DNA, 31 bp, Artificial Sequence; identical to SEQ ID NO: 7016
  Probe

SEQ ID NO: 49728 - DNA, 31 bp, Artificial Sequence; identical to SEQ ID NO: 7017
  Probe

SEQ ID NO: 49729 - DNA, 31 bp, Artificial Sequence; identical to SEQ ID NO: 22662
  Probe

SEQ ID NO: 49730 - DNA, 16 bp, Artificial Sequence
  Probe
gtcggtagagcatgag

SEQ ID NO: 49731 - DNA, 17 bp, Artificial Sequence
  Probe
gtcggtagagcatgaga

SEQ ID NO: 49732 - DNA, 18 bp, Artificial Sequence
  Probe
gtcggtagagcatgagac

SEQ ID NO: 49733 - DNA, 16 bp, Artificial Sequence
  Probe
gtcgtggttgtagtcc

SEQ ID NO: 49734 - DNA, 18 bp, Artificial Sequence
  Probe
gtcgtggttgtagtccgt

SEQ ID NO: 49735 - DNA, 26 bp, Artificial Sequence
  Probe
gtcgtggttgtagtccgtgcgagaat

SEQ ID NO: 49736 - DNA, 27 bp, Artificial Sequence
  Probe
gtcgtggttgtagtccgtgcgagaata

SEQ ID NO: 49737 - DNA, 28 bp, Artificial Sequence
  Probe
gtcgtggttgtagtccgtgcgagaataa

SEQ ID NO: 49738 - DNA, 29 bp, Artificial Sequence
  Probe
gtcgtggttgtagtccgtgcgagaataat

SEQ ID NO: 49739 - DNA, 30 bp, Artificial Sequence; identical to SEQ ID NO: 7024
  Probe

SEQ ID NO: 49740 - DNA, 24 bp, Artificial Sequence
  Probe
gtctaacaacatggctttctcaac

SEQ ID NO: 49741 - DNA, 25 bp, Artificial Sequence
  Probe
gtctaacaacatggctttctcaact

SEQ ID NO: 49742 - DNA, 24 bp, Artificial Sequence
  Probe
gtctagtggttaggattcggcgct

SEQ ID NO: 49743 - DNA, 27 bp, Artificial Sequence
  Probe
gtctagtggttaggattcggcgctctc

SEQ ID NO: 49744 - DNA, 22 bp, Artificial Sequence
  Probe
gtctcataatctgaaggtcgtg

SEQ ID NO: 49745 - DNA, 50 bp, Artificial Sequence; identical to SEQ ID NO: 41231
  Probe

SEQ ID NO: 49746 - DNA, 22 bp, Artificial Sequence
  Probe
gtctgcaccaggatggccgagt

SEQ ID NO: 49747 - DNA, 32 bp, Artificial Sequence
  Probe
gtcttaggccccaaaaattttggtgcaactcc

SEQ ID NO: 49748 - DNA, 33 bp, Artificial Sequence
  Probe
gtcttaggccccaaaaattttggtgcaactcca

SEQ ID NO: 49749 - DNA, 37 bp, Artificial Sequence
  Probe
gtcttaggccccaaaaattttggtgcaactccaaata

SEQ ID NO: 49750 - DNA, 46 bp, Artificial Sequence
  Probe
gtcttaggccccaaaaattttggtgcaactccaaataaaagtaata

SEQ ID NO: 49751 - DNA, 42 bp, Artificial Sequence; identical to SEQ ID NO: 7041
  Probe

SEQ ID NO: 49752 - DNA, 17 bp, Artificial Sequence
  Probe
gtgaagcattggactgt

SEQ ID NO: 49753 - DNA, 39 bp, Artificial Sequence; identical to SEQ ID NO: 1502
  Probe

SEQ ID NO: 49754 - DNA, 40 bp, Artificial Sequence; identical to SEQ ID NO: 7046
  Probe

SEQ ID NO: 49755 - DNA, 41 bp, Artificial Sequence; identical to SEQ ID NO: 7047
  Probe

SEQ ID NO: 49756 - DNA, 42 bp, Artificial Sequence; identical to SEQ ID NO: 7048
  Probe

SEQ ID NO: 49757 - DNA, 40 bp, Artificial Sequence; identical to SEQ ID NO: 22728
  Probe

SEQ ID NO: 49758 - DNA, 19 bp, Artificial Sequence
  Probe
gtgagtatccccgcctgtc

SEQ ID NO: 49759 - DNA, 20 bp, Artificial Sequence
  Probe
gtgagtatccccgcctgtca

SEQ ID NO: 49760 - DNA, 22 bp, Artificial Sequence
  Probe
gtgagtatccccgcctgtcacg

SEQ ID NO: 49761 - DNA, 29 bp, Artificial Sequence
  Probe
gtgatcgtatagtggttagtactctgcgt

SEQ ID NO: 49762 - DNA, 31 bp, Artificial Sequence; identical to SEQ ID NO: 1506
  Probe

SEQ ID NO: 49763 - DNA, 32 bp, Artificial Sequence; identical to SEQ ID NO: 1507
  Probe

SEQ ID NO: 49764 - DNA, 22 bp, Artificial Sequence
  Probe
gtgattttcatattgaattgca

SEQ ID NO: 49765 - DNA, 21 bp, Artificial Sequence
  Probe
gtgcaactccaaataaaagta

SEQ ID NO: 49766 - DNA, 17 bp, Artificial Sequence
  Probe
gtgcacttggacgaacc

SEQ ID NO: 49767 - DNA, 50 bp, Artificial Sequence
  Probe
gtgctaataacgccaaggtcgcgggttcgatccccgtacgggccactgga

SEQ ID NO: 49768 - DNA, 50 bp, Artificial Sequence
  Probe
gtgctaataacgccaaggtcgcgggttcgatccccgtactggccacgtat

SEQ ID NO: 49769 - DNA, 50 bp, Artificial Sequence
  Probe
gtgctgggcccataacccagaggtcgatggatcgaaaccatcctctgcta

SEQ ID NO: 49770 - DNA, 50 bp, Artificial Sequence; identical to SEQ ID NO: 41263
  Probe

SEQ ID NO: 49771 - DNA, 27 bp, Artificial Sequence
  Probe
gtggagttaaagactttttctctgatt

SEQ ID NO: 49772 - DNA, 28 bp, Artificial Sequence
  Probe
gtggagttaaagactttttctctgattt

SEQ ID NO: 49773 - DNA, 32 bp, Artificial Sequence
  Probe
gtggcacggagaattttggattctcagggatg

SEQ ID NO: 49774 - DNA, 30 bp, Artificial Sequence; identical to SEQ ID NO: 22788
  Probe

SEQ ID NO: 49775 - DNA, 33 bp, Artificial Sequence; identical to SEQ ID NO: 7064
  Probe

SEQ ID NO: 49776 - DNA, 18 bp, Artificial Sequence
  Probe
gtggcgtcccggtagctc

SEQ ID NO: 49777 - DNA, 30 bp, Artificial Sequence; identical to SEQ ID NO: 22800
  Probe

SEQ ID NO: 49778 - DNA, 23 bp, Artificial Sequence
  Probe
gtggggttttgcagtccttagct

SEQ ID NO: 49779 - DNA, 17 bp, Artificial Sequence
  Probe
gtggtagaattctcgcc

SEQ ID NO: 49780 - DNA, 18 bp, Artificial Sequence
  Probe
gtggtagaattctcgcct

SEQ ID NO: 49781 - DNA, 16 bp, Artificial Sequence
  Probe
gtggtagagcgcgtgc

SEQ ID NO: 49782 - DNA, 26 bp, Artificial Sequence
  Probe
gtggtctagtggttaggattcggcgc

SEQ ID NO: 49783 - DNA, 16 bp, Artificial Sequence
  Probe
gtggtgagtatccccg

SEQ ID NO: 49784 - DNA, 17 bp, Artificial Sequence
  Probe
gtggtgagtatccccgc

SEQ ID NO: 49785 - DNA, 35 bp, Artificial Sequence; identical to SEQ ID NO: 22844
  Probe

SEQ ID NO: 49786 - DNA, 35 bp, Artificial Sequence; identical to SEQ ID NO: 14107
  Probe

SEQ ID NO: 49787 - DNA, 17 bp, Artificial Sequence
  Probe
gtggttagtactctgcg

SEQ ID NO: 49788 - DNA, 18 bp, Artificial Sequence
  Probe
gtggttagtactctgcgt

SEQ ID NO: 49789 - DNA, 19 bp, Artificial Sequence
  Probe
gtggttagtactctgcgtt

SEQ ID NO: 49790 - DNA, 20 bp, Artificial Sequence
  Probe
gtggttagtactctgcgttg

SEQ ID NO: 49791 - DNA, 25 bp, Artificial Sequence
  Probe
gtggttcagtggtagaattctcgcc

SEQ ID NO: 49792 - DNA, 22 bp, Artificial Sequence
  Probe
gtggttcgagcccacccaggga

SEQ ID NO: 49793 - DNA, 16 bp, Artificial Sequence
  Probe
gtggttgtagtccgtg

SEQ ID NO: 49794 - DNA, 19 bp, Artificial Sequence
  Probe
gtggttgtagtccgtgcga

SEQ ID NO: 49795 - DNA, 23 bp, Artificial Sequence
  Probe
gtggttgtagtccgtgcgagaat

SEQ ID NO: 49796 - DNA, 24 bp, Artificial Sequence
  Probe
gtggttgtagtccgtgcgagaata

SEQ ID NO: 49797 - DNA, 25 bp, Artificial Sequence
  Probe
gtggttgtagtccgtgcgagaataa

SEQ ID NO: 49798 - DNA, 27 bp, Artificial Sequence
  Probe
gtggttgtagtccgtgcgagaataatg

SEQ ID NO: 49799 - DNA, 19 bp, Artificial Sequence
  Probe
gtgtagtggttatcacgtt

SEQ ID NO: 49800 - DNA, 16 bp, Artificial Sequence
  Probe
gtgtccctagtagctc

SEQ ID NO: 49801 - DNA, 20 bp, Artificial Sequence
  Probe
gtgtgaatccttcgatagct

SEQ ID NO: 49802 - DNA, 22 bp, Artificial Sequence
  Probe
gtgtgaatccttcgatagctca

SEQ ID NO: 49803 - DNA, 20 bp, Artificial Sequence
  Probe
gtgtgataggtggcacggag

SEQ ID NO: 49804 - DNA, 21 bp, Artificial Sequence
  Probe
gtgtgataggtggcacggaga

SEQ ID NO: 49805 - DNA, 19 bp, Artificial Sequence
  Probe
gtgtgtcaggatggccgag

SEQ ID NO: 49806 - DNA, 26 bp, Artificial Sequence
  Probe
gtgttcgaatcacgtcggggtcaaac

SEQ ID NO: 49807 - DNA, 36 bp, Artificial Sequence; identical to SEQ ID NO: 22916
  Probe

SEQ ID NO: 49808 - DNA, 24 bp, Artificial Sequence
  Probe
gtgtttgtgggtttaagtcccatt

SEQ ID NO: 49809 - DNA, 26 bp, Artificial Sequence
  Probe
gtgtttgtgggtttaagtcccattgg

SEQ ID NO: 49810 - DNA, 27 bp, Artificial Sequence
  Probe
gtgtttgtgggtttaagtcccattggt

SEQ ID NO: 49811 - DNA, 31 bp, Artificial Sequence; identical to SEQ ID NO: 22919
  Probe

SEQ ID NO: 49812 - DNA, 32 bp, Artificial Sequence; identical to SEQ ID NO: 7107
  Probe

SEQ ID NO: 49813 - DNA, 33 bp, Artificial Sequence; identical to SEQ ID NO: 7108
  Probe

SEQ ID NO: 49814 - DNA, 21 bp, Artificial Sequence
  Probe
gttaaagactttttctctgat

SEQ ID NO: 49815 - DNA, 22 bp, Artificial Sequence
  Probe
gttaaagactttttctctgatt

SEQ ID NO: 49816 - DNA, 19 bp, Artificial Sequence
  Probe
gttaaagattaagagaacc

SEQ ID NO: 49817 - DNA, 25 bp, Artificial Sequence
  Probe
gttaaagattaagagaaccaacacc

SEQ ID NO: 49818 - DNA, 35 bp, Artificial Sequence; identical to SEQ ID NO: 22925
  Probe

SEQ ID NO: 49819 - DNA, 36 bp, Artificial Sequence; identical to SEQ ID NO: 7116
  Probe

SEQ ID NO: 49820 - DNA, 37 bp, Artificial Sequence; identical to SEQ ID NO: 7117
  Probe

SEQ ID NO: 49821 - DNA, 38 bp, Artificial Sequence; identical to SEQ ID NO: 7118
  Probe

SEQ ID NO: 49822 - DNA, 39 bp, Artificial Sequence; identical to SEQ ID NO: 7119
  Probe

SEQ ID NO: 49823 - DNA, 40 bp, Artificial Sequence; identical to SEQ ID NO: 7120
  Probe

SEQ ID NO: 49824 - DNA, 41 bp, Artificial Sequence; identical to SEQ ID NO: 7121
  Probe

SEQ ID NO: 49825 - DNA, 42 bp, Artificial Sequence; identical to SEQ ID NO: 7122
  Probe

SEQ ID NO: 49826 - DNA, 46 bp, Artificial Sequence; identical to SEQ ID NO: 7124
  Probe

SEQ ID NO: 49827 - DNA, 38 bp, Artificial Sequence; identical to SEQ ID NO: 22935
  Probe

SEQ ID NO: 49828 - DNA, 23 bp, Artificial Sequence
  Probe
gttaactaagtgtttgtgggttt

SEQ ID NO: 49829 - DNA, 24 bp, Artificial Sequence
  Probe
gttaactaagtgtttgtgggttta

SEQ ID NO: 49830 - DNA, 28 bp, Artificial Sequence
  Probe
gttaactaagtgtttgtgggtttaagtc

SEQ ID NO: 49831 - DNA, 33 bp, Artificial Sequence; identical to SEQ ID NO: 22937
  Probe

SEQ ID NO: 49832 - DNA, 35 bp, Artificial Sequence
  Probe
gttaactaagtgtttgtgggtttaagtcccattgg

SEQ ID NO: 49833 - DNA, 39 bp, Artificial Sequence
  Probe
gttaactaagtgtttgtgggtttaagtcccattggtcta

SEQ ID NO: 49834 - DNA, 41 bp, Artificial Sequence; identical to SEQ ID NO: 7128
  Probe

SEQ ID NO: 49835 - DNA, 42 bp, Artificial Sequence; identical to SEQ ID NO: 22941
  Probe

SEQ ID NO: 49836 - DNA, 43 bp, Artificial Sequence; identical to SEQ ID NO: 7129
  Probe

SEQ ID NO: 49837 - DNA, 22 bp, Artificial Sequence
  Probe
gttaagatggcagagcccggta

SEQ ID NO: 49838 - DNA, 26 bp, Artificial Sequence
  Probe
gttaagatggcagagcccggtaatcg

SEQ ID NO: 49839 - DNA, 27 bp, Artificial Sequence
  Probe
gttaagatggcagagcccggtaatcgc

SEQ ID NO: 49840 - DNA, 30 bp, Artificial Sequence; identical to SEQ ID NO: 1521
  Probe

SEQ ID NO: 49841 - DNA, 31 bp, Artificial Sequence; identical to SEQ ID NO: 22952
  Probe

SEQ ID NO: 49842 - DNA, 42 bp, Artificial Sequence; identical to SEQ ID NO: 1524
  Probe

SEQ ID NO: 49843 - DNA, 43 bp, Artificial Sequence; identical to SEQ ID NO: 7143
  Probe

SEQ ID NO: 49844 - DNA, 50 bp, Artificial Sequence; identical to SEQ ID NO: 7145
  Probe

SEQ ID NO: 49845 - DNA, 32 bp, Artificial Sequence; identical to SEQ ID NO: 14122
  Probe

SEQ ID NO: 49846 - DNA, 21 bp, Artificial Sequence
  Probe
gttaggcctctttttaccagc

SEQ ID NO: 49847 - DNA, 20 bp, Artificial Sequence
  Probe
gttatacccttcccgtacta

SEQ ID NO: 49848 - DNA, 28 bp, Artificial Sequence
  Probe
gttatgaaatggtttttctaataccttt

SEQ ID NO: 49849 - DNA, 31 bp, Artificial Sequence; identical to SEQ ID NO: 7152
  Probe

SEQ ID NO: 49850 - DNA, 24 bp, Artificial Sequence
  Probe
gttcaaatcacgtcggggtcaaca

SEQ ID NO: 49851 - DNA, 24 bp, Artificial Sequence
  Probe
gttcaaatcccggacgagccccct

SEQ ID NO: 49852 - DNA, 24 bp, Artificial Sequence
  Probe
gttcaaatccgggtgccccctcaa

SEQ ID NO: 49853 - DNA, 21 bp, Artificial Sequence
  Probe
gttcaaatctcggtggaacct

SEQ ID NO: 49854 - DNA, 21 bp, Artificial Sequence
  Probe
gttcaaatctcggtgggacct

SEQ ID NO: 49855 - DNA, 24 bp, Artificial Sequence
  Probe
gttcaagtccctgttcgggcggca

SEQ ID NO: 49856 - DNA, 21 bp, Artificial Sequence
  Probe
gttcaatccccggcacctcca

SEQ ID NO: 49857 - DNA, 24 bp, Artificial Sequence
  Probe
gttcaattccccgacggggaggtg

SEQ ID NO: 49858 - DNA, 24 bp, Artificial Sequence
  Probe
gttcaattcccggtcagggaacca

SEQ ID NO: 49859 - DNA, 24 bp, Artificial Sequence
  Probe
gttcagtggtagaattctcgcctg

SEQ ID NO: 49860 - DNA, 39 bp, Artificial Sequence
  Probe
gttcagttgatgcagagtggggttttgcagtccttagct

SEQ ID NO: 49861 - DNA, 24 bp, Artificial Sequence
  Probe
gttcgaaaccgggcggaaacacct

SEQ ID NO: 49862 - DNA, 24 bp, Artificial Sequence
  Probe
gttcgaacctcagagggggcagct

SEQ ID NO: 49863 - DNA, 21 bp, Artificial Sequence
  Probe
gttcgaatcccaccgctgcca

SEQ ID NO: 49864 - DNA, 22 bp, Artificial Sequence
  Probe
gttcgaatcccaccgctgccac

SEQ ID NO: 49865 - DNA, 23 bp, Artificial Sequence
  Probe
gttcgaatcccaccgctgccaca

SEQ ID NO: 49866 - DNA, 24 bp, Artificial Sequence
  Probe
gttcgaatcccaccgctgccacac

SEQ ID NO: 49867 - DNA, 24 bp, Artificial Sequence
  Probe
gttcgaatcccaccgctgccaggt

SEQ ID NO: 49868 - DNA, 21 bp, Artificial Sequence
  Probe
gttcgaatcccacttctgaca

SEQ ID NO: 49869 - DNA, 24 bp, Artificial Sequence
  Probe
gttcgaatcccacttctgacacaa

SEQ ID NO: 49870 - DNA, 21 bp, Artificial Sequence
  Probe
gttcgaatcccagcggtgcct

SEQ ID NO: 49871 - DNA, 22 bp, Artificial Sequence
  Probe
gttcgaatcccagcggtgcctc

SEQ ID NO: 49872 - DNA, 24 bp, Artificial Sequence
  Probe
gttcgaatcccagcggtgcctccg

SEQ ID NO: 49873 - DNA, 19 bp, Artificial Sequence
  Probe
gttcgaatcccatcctcgt

SEQ ID NO: 49874 - DNA, 21 bp, Artificial Sequence
  Probe
gttcgaatcccatcctcgtcg

SEQ ID NO: 49875 - DNA, 24 bp, Artificial Sequence
  Probe
gttcgaatccgagtcacggcaggt

SEQ ID NO: 49876 - DNA, 24 bp, Artificial Sequence
  Probe
gttcgaatccgagtcacggcattg

SEQ ID NO: 49877 - DNA, 21 bp, Artificial Sequence
  Probe
gttcgaatccggctcgaagga

SEQ ID NO: 49878 - DNA, 24 bp, Artificial Sequence
  Probe
gttcgaatccggctcgaaggacga

SEQ ID NO: 49879 - DNA, 22 bp, Artificial Sequence
  Probe
gttcgaatcctgccgactacga

SEQ ID NO: 49880 - DNA, 22 bp, Artificial Sequence
  Probe
gttcgaatcctgccgactacgg

SEQ ID NO: 49881 - DNA, 24 bp, Artificial Sequence
  Probe
gttcgaatcctgccgactacggca

SEQ ID NO: 49882 - DNA, 22 bp, Artificial Sequence
  Probe
gttcgaatcctgccgactacgt

SEQ ID NO: 49883 - DNA, 24 bp, Artificial Sequence
  Probe
gttcgaatcctgccgactacgtca

SEQ ID NO: 49884 - DNA, 24 bp, Artificial Sequence
  Probe
gttcgactcccggtatgggaacaa

SEQ ID NO: 49885 - DNA, 21 bp, Artificial Sequence
  Probe
gttcgactcccggtgtgggaa

SEQ ID NO: 49886 - DNA, 24 bp, Artificial Sequence
  Probe
gttcgactcccggtgtgggaacgc

SEQ ID NO: 49887 - DNA, 19 bp, Artificial Sequence
  Probe
gttcgagcccacccaggga

SEQ ID NO: 49888 - DNA, 21 bp, Artificial Sequence
  Probe
gttcgagcccacccagggacg

SEQ ID NO: 49889 - DNA, 22 bp, Artificial Sequence
  Probe
gttcgagcccacccagggacgc

SEQ ID NO: 49890 - DNA, 23 bp, Artificial Sequence
  Probe
gttcgagcccacccagggacgcc

SEQ ID NO: 49891 - DNA, 24 bp, Artificial Sequence
  Probe
gttcgagcccacccagggacgcct

SEQ ID NO: 49892 - DNA, 24 bp, Artificial Sequence
  Probe
gttcgagccccacgttgggcggca

SEQ ID NO: 49893 - DNA, 21 bp, Artificial Sequence
  Probe
gttcgagccccagtggaacca

SEQ ID NO: 49894 - DNA, 24 bp, Artificial Sequence
  Probe
gttcgagtcccacctggggtgtcg

SEQ ID NO: 49895 - DNA, 22 bp, Artificial Sequence
  Probe
gttcgagtcccatctggggtgg

SEQ ID NO: 49896 - DNA, 23 bp, Artificial Sequence
  Probe
gttcgagtcccatctggggtggc

SEQ ID NO: 49897 - DNA, 23 bp, Artificial Sequence
  Probe
gttcgagtcccatctgggtcgcg

SEQ ID NO: 49898 - DNA, 24 bp, Artificial Sequence
  Probe
gttcgagtcccatctgggtcgcgt

SEQ ID NO: 49899 - DNA, 21 bp, Artificial Sequence
  Probe
gttcgagtcccttcgtggtcg

SEQ ID NO: 49900 - DNA, 22 bp, Artificial Sequence
  Probe
gttcgagtcccttcgtggtcgg

SEQ ID NO: 49901 - DNA, 22 bp, Artificial Sequence
  Probe
gttcgagtcccttcgtggtcgt

SEQ ID NO: 49902 - DNA, 23 bp, Artificial Sequence
  Probe
gttcgagtcccttcgtggtcgtc

SEQ ID NO: 49903 - DNA, 24 bp, Artificial Sequence
  Probe
gttcgagtcccttcgtggtcgttg

SEQ ID NO: 49904 - DNA, 24 bp, Artificial Sequence
  Probe
gttcgagtcctgccgcggtcgaag

SEQ ID NO: 49905 - DNA, 24 bp, Artificial Sequence
  Probe
gttcgatccccagcatctccagtg

SEQ ID NO: 49906 - DNA, 21 bp, Artificial Sequence
  Probe
gttcgatccccggcatctcca

SEQ ID NO: 49907 - DNA, 23 bp, Artificial Sequence
  Probe
gttcgatccccggcatctccatt

SEQ ID NO: 49908 - DNA, 24 bp, Artificial Sequence
  Probe
gttcgatccccggcatctccattg

SEQ ID NO: 49909 - DNA, 23 bp, Artificial Sequence
  Probe
gttcgatccccgtacgggccaca

SEQ ID NO: 49910 - DNA, 23 bp, Artificial Sequence
  Probe
gttcgatccccgtacgggccacg

SEQ ID NO: 49911 - DNA, 24 bp, Artificial Sequence
  Probe
gttcgatccccgtacgggccacga

SEQ ID NO: 49912 - DNA, 23 bp, Artificial Sequence
  Probe
gttcgatccccgtacgggccact

SEQ ID NO: 49913 - DNA, 24 bp, Artificial Sequence
  Probe
gttcgatccccgtacgggccactg

SEQ ID NO: 49914 - DNA, 22 bp, Artificial Sequence
  Probe
gttcgatcccgggtttcggcac

SEQ ID NO: 49915 - DNA, 21 bp, Artificial Sequence
  Probe
gttcgatcctcacacggggca

SEQ ID NO: 49916 - DNA, 23 bp, Artificial Sequence
  Probe
gttcgatcctcacacggggcaca

SEQ ID NO: 49917 - DNA, 24 bp, Artificial Sequence
  Probe
gttcgatcctcacacggggcacaa

SEQ ID NO: 49918 - DNA, 22 bp, Artificial Sequence
  Probe
gttcgattccccgacggggaga

SEQ ID NO: 49919 - DNA, 23 bp, Artificial Sequence
  Probe
gttcgattccccgacggggagac

SEQ ID NO: 49920 - DNA, 22 bp, Artificial Sequence
  Probe
gttcgattccccgacggggagg

SEQ ID NO: 49921 - DNA, 23 bp, Artificial Sequence
  Probe
gttcgattccccgacggggaggc

SEQ ID NO: 49922 - DNA, 24 bp, Artificial Sequence
  Probe
gttcgattccccgacggggaggca

SEQ ID NO: 49923 - DNA, 21 bp, Artificial Sequence
  Probe
gttcgattcccggccaacgca

SEQ ID NO: 49924 - DNA, 24 bp, Artificial Sequence
  Probe
gttcgattcccggccaacgcaagt

SEQ ID NO: 49925 - DNA, 24 bp, Artificial Sequence
  Probe
gttcgattcccggccaacgcagtg

SEQ ID NO: 49926 - DNA, 21 bp, Artificial Sequence
  Probe
gttcgattcccggccaatgca

SEQ ID NO: 49927 - DNA, 24 bp, Artificial Sequence
  Probe
gttcgattcccggccaatgcacga

SEQ ID NO: 49928 - DNA, 24 bp, Artificial Sequence
  Probe
gttcgattcccggccaatgcagca

SEQ ID NO: 49929 - DNA, 24 bp, Artificial Sequence
  Probe
gttcgattcccggtcagggaacaa

SEQ ID NO: 49930 - DNA, 24 bp, Artificial Sequence
  Probe
gttcgattcccggtcatggaacca

SEQ ID NO: 49931 - DNA, 24 bp, Artificial Sequence
  Probe
gttcgattcctggtcagggaacca

SEQ ID NO: 49932 - DNA, 23 bp, Artificial Sequence
  Probe
gttcgattccttccttttttgtc

SEQ ID NO: 49933 - DNA, 23 bp, Artificial Sequence
  Probe
gttcgattctcatagtcctagaa

SEQ ID NO: 49934 - DNA, 27 bp, Artificial Sequence
  Probe
gttcttgtagttgaaatacaacgatgg

SEQ ID NO: 49935 - DNA, 28 bp, Artificial Sequence
  Probe
gttcttgtagttgaaatacaacgatggt

SEQ ID NO: 49936 - DNA, 38 bp, Artificial Sequence; identical to SEQ ID NO: 7200
  Probe

SEQ ID NO: 49937 - DNA, 46 bp, Artificial Sequence; identical to SEQ ID NO: 1528
  Probe

SEQ ID NO: 49938 - DNA, 50 bp, Artificial Sequence; identical to SEQ ID NO: 1529
  Probe

SEQ ID NO: 49939 - DNA, 50 bp, Artificial Sequence; identical to SEQ ID NO: 23018
  Probe

SEQ ID NO: 49940 - DNA, 18 bp, Artificial Sequence
  Probe
gttgatgcagagtggggt

SEQ ID NO: 49941 - DNA, 19 bp, Artificial Sequence
  Probe
gttgatgcagagtggggtt

SEQ ID NO: 49942 - DNA, 23 bp, Artificial Sequence
  Probe
gttgatgcagagtggggttttgc

SEQ ID NO: 49943 - DNA, 26 bp, Artificial Sequence
  Probe
gttgatgcagagtggggttttgcagt

SEQ ID NO: 49944 - DNA, 28 bp, Artificial Sequence
  Probe
gttgatgcagagtggggttttgcagtcc

SEQ ID NO: 49945 - DNA, 29 bp, Artificial Sequence
  Probe
gttgatgcagagtggggttttgcagtcct

SEQ ID NO: 49946 - DNA, 33 bp, Artificial Sequence; identical to SEQ ID NO: 23021
  Probe

SEQ ID NO: 49947 - DNA, 34 bp, Artificial Sequence; identical to SEQ ID NO: 7208
  Probe

SEQ ID NO: 49948 - DNA, 28 bp, Artificial Sequence
  Probe
gttgattagggtgcttagctgttaacta

SEQ ID NO: 49949 - DNA, 36 bp, Artificial Sequence; identical to SEQ ID NO: 25605
  Probe

SEQ ID NO: 49950 - DNA, 38 bp, Artificial Sequence
  Probe
gttgattagggtgcttagctgttaactaagtgtttgtg

SEQ ID NO: 49951 - DNA, 28 bp, Artificial Sequence
  Probe
gttggtggttcgagcccacccagggacg

SEQ ID NO: 49952 - DNA, 21 bp, Artificial Sequence
  Probe
gttggttatacccttcccgta

SEQ ID NO: 49953 - DNA, 27 bp, Artificial Sequence
  Probe
gttggttatacccttcccgtactaatt

SEQ ID NO: 49954 - DNA, 17 bp, Artificial Sequence
  Probe
gttgtagtccgtgcgag

SEQ ID NO: 49955 - DNA, 19 bp, Artificial Sequence
  Probe
gttgtagtccgtgcgagaa

SEQ ID NO: 49956 - DNA, 21 bp, Artificial Sequence
  Probe
gttgtagtccgtgcgagaata

SEQ ID NO: 49957 - DNA, 24 bp, Artificial Sequence
  Probe
gttgtagtccgtgcgagaataatg

SEQ ID NO: 49958 - DNA, 50 bp, Artificial Sequence; identical to SEQ ID NO: 1530
  Probe

SEQ ID NO: 49959 - DNA, 18 bp, Artificial Sequence
  Probe
gtttaagtcccattggtc

SEQ ID NO: 49960 - DNA, 17 bp, Artificial Sequence
  Probe
gtttagacgggctcaca

SEQ ID NO: 49961 - DNA, 18 bp, Artificial Sequence
  Probe
gtttagacgggctcacat

SEQ ID NO: 49962 - DNA, 20 bp, Artificial Sequence
  Probe
gtttagacgggctcacatca

SEQ ID NO: 49963 - DNA, 25 bp, Artificial Sequence
  Probe
gtttagacgggctcacatcacccca

SEQ ID NO: 49964 - DNA, 26 bp, Artificial Sequence
  Probe
gtttagacgggctcacatcaccccat

SEQ ID NO: 49965 - DNA, 27 bp, Artificial Sequence
  Probe
gtttagacgggctcacatcaccccata

SEQ ID NO: 49966 - DNA, 28 bp, Artificial Sequence
  Probe
gtttagacgggctcacatcaccccataa

SEQ ID NO: 49967 - DNA, 31 bp, Artificial Sequence; identical to SEQ ID NO: 7236
  Probe

SEQ ID NO: 49968 - DNA, 32 bp, Artificial Sequence; identical to SEQ ID NO: 7237
  Probe

SEQ ID NO: 49969 - DNA, 33 bp, Artificial Sequence; identical to SEQ ID NO: 7238
  Probe

SEQ ID NO: 49970 - DNA, 34 bp, Artificial Sequence; identical to SEQ ID NO: 7239
  Probe

SEQ ID NO: 49971 - DNA, 23 bp, Artificial Sequence
  Probe
gtttatgtagcttacctcctcaa

SEQ ID NO: 49972 - DNA, 27 bp, Artificial Sequence
  Probe
gtttatgtagcttacctcctcaaagca

SEQ ID NO: 49973 - DNA, 31 bp, Artificial Sequence; identical to SEQ ID NO: 7244
  Probe

SEQ ID NO: 49974 - DNA, 32 bp, Artificial Sequence; identical to SEQ ID NO: 7245
  Probe

SEQ ID NO: 49975 - DNA, 33 bp, Artificial Sequence; identical to SEQ ID NO: 1537
  Probe

SEQ ID NO: 49976 - DNA, 37 bp, Artificial Sequence; identical to SEQ ID NO: 1541
  Probe

SEQ ID NO: 49977 - DNA, 38 bp, Artificial Sequence; identical to SEQ ID NO: 7246
  Probe

SEQ ID NO: 49978 - DNA, 39 bp, Artificial Sequence; identical to SEQ ID NO: 7247
  Probe

SEQ ID NO: 49979 - DNA, 41 bp, Artificial Sequence; identical to SEQ ID NO: 7248
  Probe

SEQ ID NO: 49980 - DNA, 42 bp, Artificial Sequence; identical to SEQ ID NO: 23075
  Probe

SEQ ID NO: 49981 - DNA, 43 bp, Artificial Sequence; identical to SEQ ID NO: 7249
  Probe

SEQ ID NO: 49982 - DNA, 44 bp, Artificial Sequence; identical to SEQ ID NO: 7250
  Probe

SEQ ID NO: 49983 - DNA, 45 bp, Artificial Sequence
  Probe
gtttatgtagcttacctcctcaaagcaatacactgaaaatgttta

SEQ ID NO: 49984 - DNA, 50 bp, Artificial Sequence; identical to SEQ ID NO: 7251
  Probe

SEQ ID NO: 49985 - DNA, 28 bp, Artificial Sequence
  Probe
gtttccgtagtggagtggttatcacgtt

SEQ ID NO: 49986 - DNA, 31 bp, Artificial Sequence; identical to SEQ ID NO: 23081
  Probe

SEQ ID NO: 49987 - DNA, 32 bp, Artificial Sequence; identical to SEQ ID NO: 23082
  Probe

SEQ ID NO: 49988 - DNA, 33 bp, Artificial Sequence; identical to SEQ ID NO: 7252
  Probe

SEQ ID NO: 49989 - DNA, 34 bp, Artificial Sequence; identical to SEQ ID NO: 23084
  Probe

SEQ ID NO: 49990 - DNA, 17 bp, Artificial Sequence
  Probe
gtttccgtagtgtagcg

SEQ ID NO: 49991 - DNA, 18 bp, Artificial Sequence
  Probe
gtttccgtagtgtagcgg

SEQ ID NO: 49992 - DNA, 24 bp, Artificial Sequence
  Probe
gtttccgtagtgtagcggttatca

SEQ ID NO: 49993 - DNA, 16 bp, Artificial Sequence
  Probe
gtttccgtagtgtagt

SEQ ID NO: 49994 - DNA, 17 bp, Artificial Sequence
  Probe
gtttccgtagtgtagtg

SEQ ID NO: 49995 - DNA, 18 bp, Artificial Sequence
  Probe
gtttccgtagtgtagtgg

SEQ ID NO: 49996 - DNA, 19 bp, Artificial Sequence
  Probe
gtttccgtagtgtagtggt

SEQ ID NO: 49997 - DNA, 20 bp, Artificial Sequence
  Probe
gtttccgtagtgtagtggtc

SEQ ID NO: 49998 - DNA, 21 bp, Artificial Sequence
  Probe
gtttccgtagtgtagtggtca

SEQ ID NO: 49999 - DNA, 22 bp, Artificial Sequence
  Probe
gtttccgtagtgtagtggtcat

SEQ ID NO: 50000 - DNA, 24 bp, Artificial Sequence
  Probe
gtttccgtagtgtagtggtcatca

SEQ ID NO: 50001 - DNA, 25 bp, Artificial Sequence
  Probe
gtttccgtagtgtagtggtcatcac

SEQ ID NO: 50002 - DNA, 34 bp, Artificial Sequence; identical to SEQ ID NO: 7259
  Probe

SEQ ID NO: 50003 - DNA, 35 bp, Artificial Sequence; identical to SEQ ID NO: 7260
  Probe

SEQ ID NO: 50004 - DNA, 36 bp, Artificial Sequence; identical to SEQ ID NO: 7261
  Probe

SEQ ID NO: 50005 - DNA, 37 bp, Artificial Sequence; identical to SEQ ID NO: 7262
  Probe

SEQ ID NO: 50006 - DNA, 50 bp, Artificial Sequence; identical to SEQ ID NO: 7263
  Probe

SEQ ID NO: 50007 - DNA, 20 bp, Artificial Sequence
  Probe
gtttccgtagtgtagtggtt

SEQ ID NO: 50008 - DNA, 21 bp, Artificial Sequence
  Probe
gtttccgtagtgtagtggtta

SEQ ID NO: 50009 - DNA, 22 bp, Artificial Sequence
  Probe
gtttccgtagtgtagtggttat

SEQ ID NO: 50010 - DNA, 23 bp, Artificial Sequence
  Probe
gtttccgtagtgtagtggttatc

SEQ ID NO: 50011 - DNA, 24 bp, Artificial Sequence
  Probe
gtttccgtagtgtagtggttatca

SEQ ID NO: 50012 - DNA, 25 bp, Artificial Sequence
  Probe
gtttccgtagtgtagtggttatcac

SEQ ID NO: 50013 - DNA, 26 bp, Artificial Sequence
  Probe
gtttccgtagtgtagtggttatcacg

SEQ ID NO: 50014 - DNA, 27 bp, Artificial Sequence
  Probe
gtttccgtagtgtagtggttatcacgt

SEQ ID NO: 50015 - DNA, 28 bp, Artificial Sequence
  Probe
gtttccgtagtgtagtggttatcacgtt

SEQ ID NO: 50016 - DNA, 29 bp, Artificial Sequence
  Probe
gtttccgtagtgtagtggttatcacgttc

SEQ ID NO: 50017 - DNA, 30 bp, Artificial Sequence; identical to SEQ ID NO: 7273
  Probe

SEQ ID NO: 50018 - DNA, 31 bp, Artificial Sequence; identical to SEQ ID NO: 7274
  Probe

SEQ ID NO: 50019 - DNA, 32 bp, Artificial Sequence; identical to SEQ ID NO: 7275
  Probe

SEQ ID NO: 50020 - DNA, 33 bp, Artificial Sequence; identical to SEQ ID NO: 7276
  Probe

SEQ ID NO: 50021 - DNA, 40 bp, Artificial Sequence; identical to SEQ ID NO: 23125
  Probe

SEQ ID NO: 50022 - DNA, 50 bp, Artificial Sequence; identical to SEQ ID NO: 7277
  Probe

SEQ ID NO: 50023 - DNA, 34 bp, Artificial Sequence; identical to SEQ ID NO: 7278
  Probe

SEQ ID NO: 50024 - DNA, 35 bp, Artificial Sequence; identical to SEQ ID NO: 7279
  Probe

SEQ ID NO: 50025 - DNA, 36 bp, Artificial Sequence; identical to SEQ ID NO: 7280
  Probe

SEQ ID NO: 50026 - DNA, 37 bp, Artificial Sequence; identical to SEQ ID NO: 7281
  Probe

SEQ ID NO: 50027 - DNA, 40 bp, Artificial Sequence; identical to SEQ ID NO: 14160
  Probe

SEQ ID NO: 50028 - DNA, 41 bp, Artificial Sequence; identical to SEQ ID NO: 23134
  Probe

SEQ ID NO: 50029 - DNA, 32 bp, Artificial Sequence; identical to SEQ ID NO: 23138
  Probe

SEQ ID NO: 50030 - DNA, 33 bp, Artificial Sequence; identical to SEQ ID NO: 23139
  Probe

SEQ ID NO: 50031 - DNA, 28 bp, Artificial Sequence
  Probe
gtttccgtagtgtagtggttattatgtt

SEQ ID NO: 50032 - DNA, 31 bp, Artificial Sequence; identical to SEQ ID NO: 23143
  Probe

SEQ ID NO: 50033 - DNA, 32 bp, Artificial Sequence; identical to SEQ ID NO: 23144
  Probe

SEQ ID NO: 50034 - DNA, 33 bp, Artificial Sequence; identical to SEQ ID NO: 7282
  Probe

SEQ ID NO: 50035 - DNA, 28 bp, Artificial Sequence
  Probe
gtttccgtggtgtagtggttatcacatt

SEQ ID NO: 50036 - DNA, 30 bp, Artificial Sequence; identical to SEQ ID NO: 11583
  Probe

SEQ ID NO: 50037 - DNA, 31 bp, Artificial Sequence; identical to SEQ ID NO: 23150
  Probe

SEQ ID NO: 50038 - DNA, 32 bp, Artificial Sequence; identical to SEQ ID NO: 7284
  Probe

SEQ ID NO: 50039 - DNA, 33 bp, Artificial Sequence; identical to SEQ ID NO: 7285
  Probe

SEQ ID NO: 50040 - DNA, 25 bp, Artificial Sequence
  Probe
gtttggtcctagcctttctattagc

SEQ ID NO: 50041 - DNA, 16 bp, Artificial Sequence
  Probe
gtttgtgggtttaagt

SEQ ID NO: 50042 - DNA, 17 bp, Artificial Sequence
  Probe
gtttgtgggtttaagtc

SEQ ID NO: 50043 - DNA, 18 bp, Artificial Sequence
  Probe
gtttgtgggtttaagtcc

SEQ ID NO: 50044 - DNA, 19 bp, Artificial Sequence
  Probe
gtttgtgggtttaagtccc

SEQ ID NO: 50045 - DNA, 23 bp, Artificial Sequence
  Probe
gtttgtgggtttaagtcccattg

SEQ ID NO: 50046 - DNA, 24 bp, Artificial Sequence
  Probe
gtttgtgggtttaagtcccattgg

SEQ ID NO: 50047 - DNA, 25 bp, Artificial Sequence
  Probe
gtttgtgggtttaagtcccattggt

SEQ ID NO: 50048 - DNA, 28 bp, Artificial Sequence
  Probe
gtttgtgggtttaagtcccattggtcta

SEQ ID NO: 50049 - DNA, 29 bp, Artificial Sequence
  Probe
gtttgtgggtttaagtcccattggtctag

SEQ ID NO: 50050 - DNA, 30 bp, Artificial Sequence; identical to SEQ ID NO: 7300
  Probe

SEQ ID NO: 50051 - DNA, 31 bp, Artificial Sequence; identical to SEQ ID NO: 7301
  Probe

SEQ ID NO: 50052 - DNA, 32 bp, Artificial Sequence; identical to SEQ ID NO: 7302
  Probe

SEQ ID NO: 50053 - DNA, 33 bp, Artificial Sequence; identical to SEQ ID NO: 7303
  Probe

SEQ ID NO: 50054 - DNA, 34 bp, Artificial Sequence; identical to SEQ ID NO: 7304
  Probe

SEQ ID NO: 50055 - DNA, 35 bp, Artificial Sequence; identical to SEQ ID NO: 7305
  Probe

SEQ ID NO: 50056 - DNA, 36 bp, Artificial Sequence; identical to SEQ ID NO: 23172
  Probe

SEQ ID NO: 50057 - DNA, 37 bp, Artificial Sequence
  Probe
gtttgtgggtttaagtcccattggtctagtaagggct

SEQ ID NO: 50058 - DNA, 28 bp, Artificial Sequence
  Probe
gtttttcatatcattggtcgtggttgta

SEQ ID NO: 50059 - DNA, 37 bp, Artificial Sequence
  Probe
gtttttcatatcattggtcgtggttgtagtccgtgcg

SEQ ID NO: 50060 - DNA, 39 bp, Artificial Sequence
  Probe
gtttttcatatcattggtcgtggttgtagtccgtgcgag

SEQ ID NO: 50061 - DNA, 40 bp, Artificial Sequence; identical to SEQ ID NO: 33585
  Probe

SEQ ID NO: 50062 - DNA, 45 bp, Artificial Sequence; identical to SEQ ID NO: 33588
  Probe

SEQ ID NO: 50063 - DNA, 46 bp, Artificial Sequence; identical to SEQ ID NO: 7307
  Probe

SEQ ID NO: 50064 - DNA, 38 bp, Artificial Sequence; identical to SEQ ID NO: 7312
  Probe

SEQ ID NO: 50065 - DNA, 39 bp, Artificial Sequence; identical to SEQ ID NO: 7313
  Probe

SEQ ID NO: 50066 - DNA, 40 bp, Artificial Sequence; identical to SEQ ID NO: 23177
  Probe

SEQ ID NO: 50067 - DNA, 42 bp, Artificial Sequence; identical to SEQ ID NO: 7314
  Probe

SEQ ID NO: 50068 - DNA, 50 bp, Artificial Sequence
  Probe
taaaagagttactttgatagagtaaataataggagcttaaacccccttat

SEQ ID NO: 50069 - DNA, 39 bp, Artificial Sequence; identical to SEQ ID NO: 7318
  Probe

SEQ ID NO: 50070 - DNA, 50 bp, Artificial Sequence; identical to SEQ ID NO: 7321
  Probe

SEQ ID NO: 50071 - DNA, 41 bp, Artificial Sequence; identical to SEQ ID NO: 7322
  Probe

SEQ ID NO: 50072 - DNA, 36 bp, Artificial Sequence; identical to SEQ ID NO: 7329
  Probe

SEQ ID NO: 50073 - DNA, 28 bp, Artificial Sequence
  Probe
taaacctagccccaaacccactccacct

SEQ ID NO: 50074 - DNA, 29 bp, Artificial Sequence
  Probe
taaagacaggggttaggcctctttttacc

SEQ ID NO: 50075 - DNA, 34 bp, Artificial Sequence; identical to SEQ ID NO: 23200
  Probe

SEQ ID NO: 50076 - DNA, 35 bp, Artificial Sequence; identical to SEQ ID NO: 23201
  Probe

SEQ ID NO: 50077 - DNA, 37 bp, Artificial Sequence; identical to SEQ ID NO: 7331
  Probe

SEQ ID NO: 50078 - DNA, 38 bp, Artificial Sequence; identical to SEQ ID NO: 7332
  Probe

SEQ ID NO: 50079 - DNA, 31 bp, Artificial Sequence; identical to SEQ ID NO: 7336
  Probe

SEQ ID NO: 50080 - DNA, 50 bp, Artificial Sequence; identical to SEQ ID NO: 7339
  Probe

SEQ ID NO: 50081 - DNA, 50 bp, Artificial Sequence; identical to SEQ ID NO: 7341
  Probe

SEQ ID NO: 50082 - DNA, 21 bp, Artificial Sequence
  Probe
taacaacatggctttctcaac

SEQ ID NO: 50083 - DNA, 16 bp, Artificial Sequence
  Probe
taacacaaagcaccca

SEQ ID NO: 50084 - DNA, 18 bp, Artificial Sequence
  Probe
taacacaaagcacccaac

SEQ ID NO: 50085 - DNA, 19 bp, Artificial Sequence
  Probe
taacacaaagcacccaact

SEQ ID NO: 50086 - DNA, 23 bp, Artificial Sequence
  Probe
taacacaaagcacccaacttaca

SEQ ID NO: 50087 - DNA, 25 bp, Artificial Sequence
  Probe
taacacaaagcacccaacttacact

SEQ ID NO: 50088 - DNA, 26 bp, Artificial Sequence
  Probe
taacacaaagcacccaacttacactt

SEQ ID NO: 50089 - DNA, 27 bp, Artificial Sequence
  Probe
taacacaaagcacccaacttacactta

SEQ ID NO: 50090 - DNA, 28 bp, Artificial Sequence
  Probe
taacacaaagcacccaacttacacttag

SEQ ID NO: 50091 - DNA, 30 bp, Artificial Sequence; identical to SEQ ID NO: 7355
  Probe

SEQ ID NO: 50092 - DNA, 31 bp, Artificial Sequence; identical to SEQ ID NO: 23224
  Probe

SEQ ID NO: 50093 - DNA, 32 bp, Artificial Sequence; identical to SEQ ID NO: 7356
  Probe

SEQ ID NO: 50094 - DNA, 33 bp, Artificial Sequence; identical to SEQ ID NO: 23226
  Probe

SEQ ID NO: 50095 - DNA, 34 bp, Artificial Sequence
  Probe
taacacaaagcacccaacttacacttaggagatt

SEQ ID NO: 50096 - DNA, 35 bp, Artificial Sequence
  Probe
taacacaaagcacccaacttacacttaggagattt

SEQ ID NO: 50097 - DNA, 36 bp, Artificial Sequence; identical to SEQ ID NO: 33673
  Probe

SEQ ID NO: 50098 - DNA, 37 bp, Artificial Sequence; identical to SEQ ID NO: 7357
  Probe

SEQ ID NO: 50099 - DNA, 39 bp, Artificial Sequence; identical to SEQ ID NO: 7358
  Probe

SEQ ID NO: 50100 - DNA, 41 bp, Artificial Sequence; identical to SEQ ID NO: 7359
  Probe

SEQ ID NO: 50101 - DNA, 45 bp, Artificial Sequence
  Probe
taacacaaagcacccaacttacacttaggagatttcaacttaact

SEQ ID NO: 50102 - DNA, 46 bp, Artificial Sequence
  Probe
taacacaaagcacccaacttacacttaggagatttcaacttaactt

SEQ ID NO: 50103 - DNA, 22 bp, Artificial Sequence
  Probe
taacacgcgaaaggtccccggt

SEQ ID NO: 50104 - DNA, 18 bp, Artificial Sequence
  Probe
taacagctatccattggt

SEQ ID NO: 50105 - DNA, 30 bp, Artificial Sequence; identical to SEQ ID NO: 7365
  Probe

SEQ ID NO: 50106 - DNA, 31 bp, Artificial Sequence; identical to SEQ ID NO: 7366
  Probe

SEQ ID NO: 50107 - DNA, 32 bp, Artificial Sequence; identical to SEQ ID NO: 7367
  Probe

SEQ ID NO: 50108 - DNA, 33 bp, Artificial Sequence; identical to SEQ ID NO: 7368
  Probe

SEQ ID NO: 50109 - DNA, 34 bp, Artificial Sequence; identical to SEQ ID NO: 23249
  Probe

SEQ ID NO: 50110 - DNA, 35 bp, Artificial Sequence; identical to SEQ ID NO: 23250
  Probe

SEQ ID NO: 50111 - DNA, 37 bp, Artificial Sequence; identical to SEQ ID NO: 7369
  Probe

SEQ ID NO: 50112 - DNA, 38 bp, Artificial Sequence; identical to SEQ ID NO: 7370
  Probe

SEQ ID NO: 50113 - DNA, 39 bp, Artificial Sequence; identical to SEQ ID NO: 7371
  Probe

SEQ ID NO: 50114 - DNA, 36 bp, Artificial Sequence
  Probe
taaccgaaaggttggtggttcgagcccacccaggga

SEQ ID NO: 50115 - DNA, 38 bp, Artificial Sequence
  Probe
taaccgaaaggttggtggttcgagcccacccagggacg

SEQ ID NO: 50116 - DNA, 40 bp, Artificial Sequence; identical to SEQ ID NO: 1570
  Probe

SEQ ID NO: 50117 - DNA, 41 bp, Artificial Sequence; identical to SEQ ID NO: 7378
  Probe

SEQ ID NO: 50118 - DNA, 40 bp, Artificial Sequence
  Probe
taaccgaaaggttggtggttcgagcccacccagggacgcg

SEQ ID NO: 50119 - DNA, 40 bp, Artificial Sequence
  Probe
taaccgaaaggttggtggttcgagcccacccagggacgct

SEQ ID NO: 50120 - DNA, 50 bp, Artificial Sequence; identical to SEQ ID NO: 7379
  Probe

SEQ ID NO: 50121 - DNA, 35 bp, Artificial Sequence
  Probe
taactaagtgtttgtgggtttaagtcccattggtc

SEQ ID NO: 50122 - DNA, 36 bp, Artificial Sequence; identical to SEQ ID NO: 23261
  Probe

SEQ ID NO: 50123 - DNA, 40 bp, Artificial Sequence
  Probe
taactaagtgtttgtgggtttaagtcccattggtctagta

SEQ ID NO: 50124 - DNA, 41 bp, Artificial Sequence; identical to SEQ ID NO: 7382
  Probe

SEQ ID NO: 50125 - DNA, 33 bp, Artificial Sequence; identical to SEQ ID NO: 7388
  Probe

SEQ ID NO: 50126 - DNA, 35 bp, Artificial Sequence; identical to SEQ ID NO: 7390
  Probe

SEQ ID NO: 50127 - DNA, 36 bp, Artificial Sequence; identical to SEQ ID NO: 7391
  Probe

SEQ ID NO: 50128 - DNA, 40 bp, Artificial Sequence; identical to SEQ ID NO: 7395
  Probe

SEQ ID NO: 50129 - DNA, 41 bp, Artificial Sequence; identical to SEQ ID NO: 7396
  Probe

SEQ ID NO: 50130 - DNA, 46 bp, Artificial Sequence; identical to SEQ ID NO: 7399
  Probe

SEQ ID NO: 50131 - DNA, 19 bp, Artificial Sequence
  Probe
taacttgaccgctctgagc

SEQ ID NO: 50132 - DNA, 20 bp, Artificial Sequence
  Probe
taacttgaccgctctgagct

SEQ ID NO: 50133 - DNA, 31 bp, Artificial Sequence; identical to SEQ ID NO: 7406
  Probe

SEQ ID NO: 50134 - DNA, 18 bp, Artificial Sequence
  Probe
taagctatcgggcccata

SEQ ID NO: 50135 - DNA, 23 bp, Artificial Sequence
  Probe
taagctatcgggcccataccccg

SEQ ID NO: 50136 - DNA, 24 bp, Artificial Sequence
  Probe
taagctatcgggcccataccccga

SEQ ID NO: 50137 - DNA, 25 bp, Artificial Sequence
  Probe
taagctatcgggcccataccccgaa

SEQ ID NO: 50138 - DNA, 26 bp, Artificial Sequence
  Probe
taagctatcgggcccataccccgaaa

SEQ ID NO: 50139 - DNA, 27 bp, Artificial Sequence
  Probe
taagctatcgggcccataccccgaaaa

SEQ ID NO: 50140 - DNA, 28 bp, Artificial Sequence
  Probe
taagctatcgggcccataccccgaaaat

SEQ ID NO: 50141 - DNA, 29 bp, Artificial Sequence
  Probe
taagctatcgggcccataccccgaaaatg

SEQ ID NO: 50142 - DNA, 30 bp, Artificial Sequence; identical to SEQ ID NO: 7423
  Probe

SEQ ID NO: 50143 - DNA, 31 bp, Artificial Sequence; identical to SEQ ID NO: 7424
  Probe

SEQ ID NO: 50144 - DNA, 32 bp, Artificial Sequence; identical to SEQ ID NO: 7425
  Probe

SEQ ID NO: 50145 - DNA, 33 bp, Artificial Sequence; identical to SEQ ID NO: 7426
  Probe

SEQ ID NO: 50146 - DNA, 34 bp, Artificial Sequence; identical to SEQ ID NO: 7427
  Probe

SEQ ID NO: 50147 - DNA, 35 bp, Artificial Sequence; identical to SEQ ID NO: 7428
  Probe

SEQ ID NO: 50148 - DNA, 36 bp, Artificial Sequence; identical to SEQ ID NO: 7429
  Probe

SEQ ID NO: 50149 - DNA, 49 bp, Artificial Sequence; identical to SEQ ID NO: 7435
  Probe

SEQ ID NO: 50150 - DNA, 50 bp, Artificial Sequence; identical to SEQ ID NO: 1573
  Probe

SEQ ID NO: 50151 - DNA, 31 bp, Artificial Sequence; identical to SEQ ID NO: 7440
  Probe

SEQ ID NO: 50152 - DNA, 32 bp, Artificial Sequence; identical to SEQ ID NO: 7441
  Probe

SEQ ID NO: 50153 - DNA, 33 bp, Artificial Sequence; identical to SEQ ID NO: 7442
  Probe

SEQ ID NO: 50154 - DNA, 44 bp, Artificial Sequence; identical to SEQ ID NO: 7450
  Probe

SEQ ID NO: 50155 - DNA, 50 bp, Artificial Sequence; identical to SEQ ID NO: 7454
  Probe

SEQ ID NO: 50156 - DNA, 17 bp, Artificial Sequence
  Probe
taagtgtttgtgggttt

SEQ ID NO: 50157 - DNA, 28 bp, Artificial Sequence
  Probe
taagtgtttgtgggtttaagtcccattg

SEQ ID NO: 50158 - DNA, 29 bp, Artificial Sequence
  Probe
taagtgtttgtgggtttaagtcccattgg

SEQ ID NO: 50159 - DNA, 33 bp, Artificial Sequence; identical to SEQ ID NO: 7458
  Probe

SEQ ID NO: 50160 - DNA, 35 bp, Artificial Sequence; identical to SEQ ID NO: 23327
  Probe

SEQ ID NO: 50161 - DNA, 36 bp, Artificial Sequence; identical to SEQ ID NO: 23328
  Probe

SEQ ID NO: 50162 - DNA, 39 bp, Artificial Sequence
  Probe
taagttaaagattaagagaaccaacacctctttacagtg

SEQ ID NO: 50163 - DNA, 43 bp, Artificial Sequence; identical to SEQ ID NO: 7460
  Probe

SEQ ID NO: 50164 - DNA, 19 bp, Artificial Sequence
  Probe
taatcatatttaccaaatg

SEQ ID NO: 50165 - DNA, 41 bp, Artificial Sequence; identical to SEQ ID NO: 7465
  Probe

SEQ ID NO: 50166 - DNA, 29 bp, Artificial Sequence
  Probe
taattgaaaacaaaatactcaaatgggcc

SEQ ID NO: 50167 - DNA, 30 bp, Artificial Sequence; identical to SEQ ID NO: 7468
  Probe

SEQ ID NO: 50168 - DNA, 31 bp, Artificial Sequence; identical to SEQ ID NO: 7469
  Probe

SEQ ID NO: 50169 - DNA, 32 bp, Artificial Sequence; identical to SEQ ID NO: 7470
  Probe

SEQ ID NO: 50170 - DNA, 33 bp, Artificial Sequence; identical to SEQ ID NO: 7471
  Probe

SEQ ID NO: 50171 - DNA, 50 bp, Artificial Sequence; identical to SEQ ID NO: 1574
  Probe

SEQ ID NO: 50172 - DNA, 21 bp, Artificial Sequence
  Probe
tacaatctccagcattccccc

SEQ ID NO: 50173 - DNA, 22 bp, Artificial Sequence
  Probe
tacaatctccagcattccccct

SEQ ID NO: 50174 - DNA, 23 bp, Artificial Sequence
  Probe
tacaatctccagcattccccctc

SEQ ID NO: 50175 - DNA, 24 bp, Artificial Sequence
  Probe
tacaatctccagcattccccctca

SEQ ID NO: 50176 - DNA, 25 bp, Artificial Sequence
  Probe
tacaatctccagcattccccctcaa

SEQ ID NO: 50177 - DNA, 27 bp, Artificial Sequence
  Probe
tacaatctccagcattccccctcaaac

SEQ ID NO: 50178 - DNA, 28 bp, Artificial Sequence
  Probe
tacaatctccagcattccccctcaaacc

SEQ ID NO: 50179 - DNA, 29 bp, Artificial Sequence
  Probe
tacaatctccagcattccccctcaaacct

SEQ ID NO: 50180 - DNA, 30 bp, Artificial Sequence; identical to SEQ ID NO: 7478
  Probe

SEQ ID NO: 50181 - DNA, 31 bp, Artificial Sequence; identical to SEQ ID NO: 7479
  Probe

SEQ ID NO: 50182 - DNA, 50 bp, Artificial Sequence; identical to SEQ ID NO: 7482
  Probe

SEQ ID NO: 50183 - DNA, 40 bp, Artificial Sequence
  Probe
tacacgcagaaggtcctgggttcgagccccagtggaacca

SEQ ID NO: 50184 - DNA, 43 bp, Artificial Sequence; identical to SEQ ID NO: 7483
  Probe

SEQ ID NO: 50185 - DNA, 45 bp, Artificial Sequence; identical to SEQ ID NO: 7484
  Probe

SEQ ID NO: 50186 - DNA, 46 bp, Artificial Sequence; identical to SEQ ID NO: 7485
  Probe

SEQ ID NO: 50187 - DNA, 18 bp, Artificial Sequence
  Probe
tacacttaggagatttca

SEQ ID NO: 50188 - DNA, 23 bp, Artificial Sequence
  Probe
tacacttaggagatttcaactta

SEQ ID NO: 50189 - DNA, 26 bp, Artificial Sequence
  Probe
tacacttaggagatttcaacttaact

SEQ ID NO: 50190 - DNA, 28 bp, Artificial Sequence
  Probe
tacacttaggagatttcaacttaacttg

SEQ ID NO: 50191 - DNA, 30 bp, Artificial Sequence; identical to SEQ ID NO: 7487
  Probe

SEQ ID NO: 50192 - DNA, 31 bp, Artificial Sequence; identical to SEQ ID NO: 23360
  Probe

SEQ ID NO: 50193 - DNA, 32 bp, Artificial Sequence; identical to SEQ ID NO: 7488
  Probe

SEQ ID NO: 50194 - DNA, 33 bp, Artificial Sequence; identical to SEQ ID NO: 7489
  Probe

SEQ ID NO: 50195 - DNA, 34 bp, Artificial Sequence; identical to SEQ ID NO: 7490
  Probe

SEQ ID NO: 50196 - DNA, 36 bp, Artificial Sequence; identical to SEQ ID NO: 7492
  Probe

SEQ ID NO: 50197 - DNA, 37 bp, Artificial Sequence; identical to SEQ ID NO: 7493
  Probe

SEQ ID NO: 50198 - DNA, 38 bp, Artificial Sequence; identical to SEQ ID NO: 7494
  Probe

SEQ ID NO: 50199 - DNA, 39 bp, Artificial Sequence; identical to SEQ ID NO: 7495
  Probe

SEQ ID NO: 50200 - DNA, 40 bp, Artificial Sequence; identical to SEQ ID NO: 7496
  Probe

SEQ ID NO: 50201 - DNA, 41 bp, Artificial Sequence; identical to SEQ ID NO: 7497
  Probe

SEQ ID NO: 50202 - DNA, 42 bp, Artificial Sequence; identical to SEQ ID NO: 7498
  Probe

SEQ ID NO: 50203 - DNA, 43 bp, Artificial Sequence; identical to SEQ ID NO: 7499
  Probe

SEQ ID NO: 50204 - DNA, 25 bp, Artificial Sequence
  Probe
tacagtcagaggttcaattcctctt

SEQ ID NO: 50205 - DNA, 26 bp, Artificial Sequence
  Probe
tacagtcagaggttcaattcctcttc

SEQ ID NO: 50206 - DNA, 27 bp, Artificial Sequence
  Probe
tacagtcagaggttcaattcctcttct

SEQ ID NO: 50207 - DNA, 28 bp, Artificial Sequence
  Probe
tacagtcagaggttcaattcctcttctt

SEQ ID NO: 50208 - DNA, 29 bp, Artificial Sequence
  Probe
tacagtcagaggttcaattcctcttctta

SEQ ID NO: 50209 - DNA, 28 bp, Artificial Sequence
  Probe
tacccacacccacccaagaacagggttt

SEQ ID NO: 50210 - DNA, 29 bp, Artificial Sequence
  Probe
tacccacacccacccaagaacagggtttg

SEQ ID NO: 50211 - DNA, 31 bp, Artificial Sequence; identical to SEQ ID NO: 7511
  Probe

SEQ ID NO: 50212 - DNA, 32 bp, Artificial Sequence; identical to SEQ ID NO: 7512
  Probe

SEQ ID NO: 50213 - DNA, 27 bp, Artificial Sequence
  Probe
tacccatggccaacctcctactcctca

SEQ ID NO: 50214 - DNA, 25 bp, Artificial Sequence
  Probe
taccccgaaaatgttggttataccc

SEQ ID NO: 50215 - DNA, 30 bp, Artificial Sequence; identical to SEQ ID NO: 7515
  Probe

SEQ ID NO: 50216 - DNA, 31 bp, Artificial Sequence; identical to SEQ ID NO: 7516
  Probe

SEQ ID NO: 50217 - DNA, 32 bp, Artificial Sequence; identical to SEQ ID NO: 7517
  Probe

SEQ ID NO: 50218 - DNA, 37 bp, Artificial Sequence
  Probe
taccccgaaaatgttggttatacccttcccgtactaa

SEQ ID NO: 50219 - DNA, 38 bp, Artificial Sequence; identical to SEQ ID NO: 7519
  Probe

SEQ ID NO: 50220 - DNA, 39 bp, Artificial Sequence; identical to SEQ ID NO: 7520
  Probe

SEQ ID NO: 50221 - DNA, 35 bp, Artificial Sequence
  Probe
taccgttaacttccaattaactagttttgacaaca

SEQ ID NO: 50222 - DNA, 50 bp, Artificial Sequence; identical to SEQ ID NO: 7523
  Probe

SEQ ID NO: 50223 - DNA, 24 bp, Artificial Sequence
  Probe
tacctcctcaaagcaatacactga

SEQ ID NO: 50224 - DNA, 26 bp, Artificial Sequence
  Probe
tactggaaagtgcacttggacgaacc

SEQ ID NO: 50225 - DNA, 50 bp, Artificial Sequence; identical to SEQ ID NO: 7535
  Probe

SEQ ID NO: 50226 - DNA, 50 bp, Artificial Sequence; identical to SEQ ID NO: 1580
  Probe

SEQ ID NO: 50227 - DNA, 22 bp, Artificial Sequence
  Probe
tagacgggctcacatcacccca

SEQ ID NO: 50228 - DNA, 23 bp, Artificial Sequence
  Probe
tagacgggctcacatcaccccat

SEQ ID NO: 50229 - DNA, 24 bp, Artificial Sequence
  Probe
tagacgggctcacatcaccccata

SEQ ID NO: 50230 - DNA, 25 bp, Artificial Sequence
  Probe
tagacgggctcacatcaccccataa

SEQ ID NO: 50231 - DNA, 26 bp, Artificial Sequence
  Probe
tagacgggctcacatcaccccataaa

SEQ ID NO: 50232 - DNA, 28 bp, Artificial Sequence
  Probe
tagacgggctcacatcaccccataaaca

SEQ ID NO: 50233 - DNA, 30 bp, Artificial Sequence; identical to SEQ ID NO: 7542
  Probe

SEQ ID NO: 50234 - DNA, 31 bp, Artificial Sequence; identical to SEQ ID NO: 7543
  Probe

SEQ ID NO: 50235 - DNA, 30 bp, Artificial Sequence
  Probe
tagagtaaataataggagcttaaaccccct

SEQ ID NO: 50236 - DNA, 32 bp, Artificial Sequence; identical to SEQ ID NO: 1581
  Probe

SEQ ID NO: 50237 - DNA, 37 bp, Artificial Sequence; identical to SEQ ID NO: 7549
  Probe

SEQ ID NO: 50238 - DNA, 38 bp, Artificial Sequence; identical to SEQ ID NO: 23428
  Probe

SEQ ID NO: 50239 - DNA, 39 bp, Artificial Sequence; identical to SEQ ID NO: 7550
  Probe

SEQ ID NO: 50240 - DNA, 40 bp, Artificial Sequence; identical to SEQ ID NO: 7551
  Probe

SEQ ID NO: 50241 - DNA, 41 bp, Artificial Sequence; identical to SEQ ID NO: 7552
  Probe

SEQ ID NO: 50242 - DNA, 25 bp, Artificial Sequence
  Probe
tagattgaagccagttgattagggt

SEQ ID NO: 50243 - DNA, 36 bp, Artificial Sequence; identical to SEQ ID NO: 7555
  Probe

SEQ ID NO: 50244 - DNA, 41 bp, Artificial Sequence; identical to SEQ ID NO: 23442
  Probe

SEQ ID NO: 50245 - DNA, 49 bp, Artificial Sequence; identical to SEQ ID NO: 23443
  Probe

SEQ ID NO: 50246 - DNA, 31 bp, Artificial Sequence
  Probe
tagcactctggactctgaatccagcgatccg

SEQ ID NO: 50247 - DNA, 49 bp, Artificial Sequence
  Probe
tagcactctggactctgaatccagcgatccgagttcaaatctcggtgga

SEQ ID NO: 50248 - DNA, 33 bp, Artificial Sequence; identical to SEQ ID NO: 23451
  Probe

SEQ ID NO: 50249 - DNA, 34 bp, Artificial Sequence; identical to SEQ ID NO: 14177
  Probe

SEQ ID NO: 50250 - DNA, 35 bp, Artificial Sequence; identical to SEQ ID NO: 14178
  Probe

SEQ ID NO: 50251 - DNA, 42 bp, Artificial Sequence; identical to SEQ ID NO: 23452
  Probe

SEQ ID NO: 50252 - DNA, 49 bp, Artificial Sequence; identical to SEQ ID NO: 1585
  Probe

SEQ ID NO: 50253 - DNA, 50 bp, Artificial Sequence; identical to SEQ ID NO: 1586
  Probe

SEQ ID NO: 50254 - DNA, 21 bp, Artificial Sequence
  Probe
tagccccaaacccactccacc

SEQ ID NO: 50255 - DNA, 22 bp, Artificial Sequence
  Probe
tagccccaaacccactccacct

SEQ ID NO: 50256 - DNA, 16 bp, Artificial Sequence
  Probe
tagcctttctattagc

SEQ ID NO: 50257 - DNA, 50 bp, Artificial Sequence
  Probe
tagcgcgttcggctgttaaccgaaaggttggtggttcgagcccacccagg

SEQ ID NO: 50258 - DNA, 26 bp, Artificial Sequence
  Probe
tagctcagtcggtagagcatcagact

SEQ ID NO: 50259 - DNA, 26 bp, Artificial Sequence
  Probe
tagctcagtcggtagagcatgagact

SEQ ID NO: 50260 - DNA, 26 bp, Artificial Sequence
  Probe
tagctcagtcggtagagcatgggact

SEQ ID NO: 50261 - DNA, 31 bp, Artificial Sequence
  Probe
tagctgttaactaagtgtttgtgggtttaag

SEQ ID NO: 50262 - DNA, 39 bp, Artificial Sequence
  Probe
tagctgttaactaagtgtttgtgggtttaagtcccattg

SEQ ID NO: 50263 - DNA, 43 bp, Artificial Sequence
  Probe
tagctgttaactaagtgtttgtgggtttaagtcccattggtct

SEQ ID NO: 50264 - DNA, 50 bp, Artificial Sequence; identical to SEQ ID NO: 7568
  Probe

SEQ ID NO: 50265 - DNA, 20 bp, Artificial Sequence
  Probe
taggagatttcaacttaact

SEQ ID NO: 50266 - DNA, 25 bp, Artificial Sequence
  Probe
taggagatttcaacttaacttgacc

SEQ ID NO: 50267 - DNA, 26 bp, Artificial Sequence
  Probe
taggagatttcaacttaacttgaccg

SEQ ID NO: 50268 - DNA, 27 bp, Artificial Sequence
  Probe
taggagatttcaacttaacttgaccgc

SEQ ID NO: 50269 - DNA, 28 bp, Artificial Sequence
  Probe
taggagatttcaacttaacttgaccgct

SEQ ID NO: 50270 - DNA, 29 bp, Artificial Sequence
  Probe
taggagatttcaacttaacttgaccgctc

SEQ ID NO: 50271 - DNA, 30 bp, Artificial Sequence; identical to SEQ ID NO: 11700
  Probe

SEQ ID NO: 50272 - DNA, 31 bp, Artificial Sequence; identical to SEQ ID NO: 7575
  Probe

SEQ ID NO: 50273 - DNA, 32 bp, Artificial Sequence; identical to SEQ ID NO: 7576
  Probe

SEQ ID NO: 50274 - DNA, 33 bp, Artificial Sequence; identical to SEQ ID NO: 7577
  Probe

SEQ ID NO: 50275 - DNA, 34 bp, Artificial Sequence; identical to SEQ ID NO: 7578
  Probe

SEQ ID NO: 50276 - DNA, 35 bp, Artificial Sequence; identical to SEQ ID NO: 7579
  Probe

SEQ ID NO: 50277 - DNA, 21 bp, Artificial Sequence
  Probe
taggatggggtgtgataggtg

SEQ ID NO: 50278 - DNA, 22 bp, Artificial Sequence
  Probe
taggatggggtgtgataggtgg

SEQ ID NO: 50279 - DNA, 26 bp, Artificial Sequence
  Probe
taggatggggtgtgataggtggcacg

SEQ ID NO: 50280 - DNA, 28 bp, Artificial Sequence
  Probe
taggatggggtgtgataggtggcacgga

SEQ ID NO: 50281 - DNA, 31 bp, Artificial Sequence; identical to SEQ ID NO: 7585
  Probe

SEQ ID NO: 50282 - DNA, 32 bp, Artificial Sequence; identical to SEQ ID NO: 1593
  Probe

SEQ ID NO: 50283 - DNA, 33 bp, Artificial Sequence; identical to SEQ ID NO: 1594
  Probe

SEQ ID NO: 50284 - DNA, 34 bp, Artificial Sequence; identical to SEQ ID NO: 7586
  Probe

SEQ ID NO: 50285 - DNA, 35 bp, Artificial Sequence; identical to SEQ ID NO: 7587
  Probe

SEQ ID NO: 50286 - DNA, 36 bp, Artificial Sequence; identical to SEQ ID NO: 1595
  Probe

SEQ ID NO: 50287 - DNA, 37 bp, Artificial Sequence; identical to SEQ ID NO: 7588
  Probe

SEQ ID NO: 50288 - DNA, 49 bp, Artificial Sequence; identical to SEQ ID NO: 23495
  Probe

SEQ ID NO: 50289 - DNA, 50 bp, Artificial Sequence; identical to SEQ ID NO: 23496
  Probe

SEQ ID NO: 50290 - DNA, 17 bp, Artificial Sequence
  Probe
taggggtatgattctcg

SEQ ID NO: 50291 - DNA, 18 bp, Artificial Sequence
  Probe
taggggtatgattctcgc

SEQ ID NO: 50292 - DNA, 48 bp, Artificial Sequence
  Probe
tagggtgcttagctgttaactaagtgtttgtgggtttaagtcccattg

SEQ ID NO: 50293 - DNA, 49 bp, Artificial Sequence; identical to SEQ ID NO: 7591
  Probe

SEQ ID NO: 50294 - DNA, 44 bp, Artificial Sequence; identical to SEQ ID NO: 7592
  Probe

SEQ ID NO: 50295 - DNA, 38 bp, Artificial Sequence; identical to SEQ ID NO: 23511
  Probe

SEQ ID NO: 50296 - DNA, 44 bp, Artificial Sequence; identical to SEQ ID NO: 7593
  Probe

SEQ ID NO: 50297 - DNA, 35 bp, Artificial Sequence; identical to SEQ ID NO: 1597
  Probe

SEQ ID NO: 50298 - DNA, 36 bp, Artificial Sequence; identical to SEQ ID NO: 23513
  Probe

SEQ ID NO: 50299 - DNA, 38 bp, Artificial Sequence; identical to SEQ ID NO: 7595
  Probe

SEQ ID NO: 50300 - DNA, 50 bp, Artificial Sequence; identical to SEQ ID NO: 7598
  Probe

SEQ ID NO: 50301 - DNA, 20 bp, Artificial Sequence
  Probe
tagtccgtgcgagaataatg

SEQ ID NO: 50302 - DNA, 16 bp, Artificial Sequence
  Probe
tagtggtgagtatccc

SEQ ID NO: 50303 - DNA, 18 bp, Artificial Sequence
  Probe
tagtggtgagtatccccg

SEQ ID NO: 50304 - DNA, 19 bp, Artificial Sequence
  Probe
tagtggtgagtatccccgc

SEQ ID NO: 50305 - DNA, 24 bp, Artificial Sequence
  Probe
tagtggtgagtatccccgcctgtc

SEQ ID NO: 50306 - DNA, 25 bp, Artificial Sequence
  Probe
tagtggtgagtatccccgcctgtca

SEQ ID NO: 50307 - DNA, 20 bp, Artificial Sequence
  Probe
tagtggttaggattcggcgc

SEQ ID NO: 50308 - DNA, 21 bp, Artificial Sequence
  Probe
tagtggttaggattcggcgct

SEQ ID NO: 50309 - DNA, 17 bp, Artificial Sequence
  Probe
tagtggttagtactctg

SEQ ID NO: 50310 - DNA, 20 bp, Artificial Sequence
  Probe
tagtggttagtactctgcgt

SEQ ID NO: 50311 - DNA, 23 bp, Artificial Sequence
  Probe
tagtggttagtactctgcgttgt

SEQ ID NO: 50312 - DNA, 19 bp, Artificial Sequence
  Probe
tagtggttagtatccccgc

SEQ ID NO: 50313 - DNA, 16 bp, Artificial Sequence
  Probe
tatacccacacccacc

SEQ ID NO: 50314 - DNA, 17 bp, Artificial Sequence
  Probe
tatacccacacccaccc

SEQ ID NO: 50315 - DNA, 18 bp, Artificial Sequence
  Probe
tatacccacacccaccca

SEQ ID NO: 50316 - DNA, 19 bp, Artificial Sequence
  Probe
tatacccacacccacccaa

SEQ ID NO: 50317 - DNA, 20 bp, Artificial Sequence
  Probe
tatacccacacccacccaag

SEQ ID NO: 50318 - DNA, 21 bp, Artificial Sequence
  Probe
tatacccacacccacccaaga

SEQ ID NO: 50319 - DNA, 22 bp, Artificial Sequence
  Probe
tatacccacacccacccaagaa

SEQ ID NO: 50320 - DNA, 23 bp, Artificial Sequence
  Probe
tatacccacacccacccaagaac

SEQ ID NO: 50321 - DNA, 24 bp, Artificial Sequence
  Probe
tatacccacacccacccaagaaca

SEQ ID NO: 50322 - DNA, 25 bp, Artificial Sequence
  Probe
tatacccacacccacccaagaacag

SEQ ID NO: 50323 - DNA, 26 bp, Artificial Sequence
  Probe
tatacccacacccacccaagaacagg

SEQ ID NO: 50324 - DNA, 27 bp, Artificial Sequence
  Probe
tatacccacacccacccaagaacaggg

SEQ ID NO: 50325 - DNA, 28 bp, Artificial Sequence
  Probe
tatacccacacccacccaagaacagggt

SEQ ID NO: 50326 - DNA, 29 bp, Artificial Sequence
  Probe
tatacccacacccacccaagaacagggtt

SEQ ID NO: 50327 - DNA, 30 bp, Artificial Sequence; identical to SEQ ID NO: 7623
  Probe

SEQ ID NO: 50328 - DNA, 31 bp, Artificial Sequence; identical to SEQ ID NO: 7624
  Probe

SEQ ID NO: 50329 - DNA, 32 bp, Artificial Sequence; identical to SEQ ID NO: 7625
  Probe

SEQ ID NO: 50330 - DNA, 33 bp, Artificial Sequence; identical to SEQ ID NO: 7626
  Probe

SEQ ID NO: 50331 - DNA, 34 bp, Artificial Sequence; identical to SEQ ID NO: 7627
  Probe

SEQ ID NO: 50332 - DNA, 35 bp, Artificial Sequence; identical to SEQ ID NO: 7628
  Probe

SEQ ID NO: 50333 - DNA, 36 bp, Artificial Sequence; identical to SEQ ID NO: 7629
  Probe

SEQ ID NO: 50334 - DNA, 37 bp, Artificial Sequence; identical to SEQ ID NO: 7630
  Probe

SEQ ID NO: 50335 - DNA, 38 bp, Artificial Sequence; identical to SEQ ID NO: 23596
  Probe

SEQ ID NO: 50336 - DNA, 39 bp, Artificial Sequence; identical to SEQ ID NO: 7631
  Probe

SEQ ID NO: 50337 - DNA, 40 bp, Artificial Sequence; identical to SEQ ID NO: 7632
  Probe

SEQ ID NO: 50338 - DNA, 25 bp, Artificial Sequence
  Probe
tatagtggttagtactctgcgttgt

SEQ ID NO: 50339 - DNA, 23 bp, Artificial Sequence
  Probe
tatcattggtcgtggttgtagtc

SEQ ID NO: 50340 - DNA, 24 bp, Artificial Sequence
  Probe
tatcattggtcgtggttgtagtcc

SEQ ID NO: 50341 - DNA, 33 bp, Artificial Sequence; identical to SEQ ID NO: 23606
  Probe

SEQ ID NO: 50342 - DNA, 38 bp, Artificial Sequence; identical to SEQ ID NO: 7637
  Probe

SEQ ID NO: 50343 - DNA, 46 bp, Artificial Sequence
  Probe
tatccattggtcttaggccccaaaaattttggtgcaactccaaata

SEQ ID NO: 50344 - DNA, 37 bp, Artificial Sequence; identical to SEQ ID NO: 23610
  Probe

SEQ ID NO: 50345 - DNA, 24 bp, Artificial Sequence
  Probe
tatgataatcatatttaccaaatg

SEQ ID NO: 50346 - DNA, 32 bp, Artificial Sequence
  Probe
tcaaaggttccgggttcgagtcccggcggagt

SEQ ID NO: 50347 - DNA, 27 bp, Artificial Sequence
  Probe
tcaaagttaaattataggctaaatcct

SEQ ID NO: 50348 - DNA, 30 bp, Artificial Sequence; identical to SEQ ID NO: 7641
  Probe

SEQ ID NO: 50349 - DNA, 31 bp, Artificial Sequence; identical to SEQ ID NO: 7642
  Probe

SEQ ID NO: 50350 - DNA, 32 bp, Artificial Sequence; identical to SEQ ID NO: 7643
  Probe

SEQ ID NO: 50351 - DNA, 33 bp, Artificial Sequence; identical to SEQ ID NO: 23623
  Probe

SEQ ID NO: 50352 - DNA, 34 bp, Artificial Sequence; identical to SEQ ID NO: 23624
  Probe

SEQ ID NO: 50353 - DNA, 35 bp, Artificial Sequence; identical to SEQ ID NO: 23625
  Probe

SEQ ID NO: 50354 - DNA, 36 bp, Artificial Sequence; identical to SEQ ID NO: 23626
  Probe

SEQ ID NO: 50355 - DNA, 38 bp, Artificial Sequence; identical to SEQ ID NO: 23628
  Probe

SEQ ID NO: 50356 - DNA, 39 bp, Artificial Sequence; identical to SEQ ID NO: 23629
  Probe

SEQ ID NO: 50357 - DNA, 40 bp, Artificial Sequence; identical to SEQ ID NO: 23630
  Probe

SEQ ID NO: 50358 - DNA, 42 bp, Artificial Sequence; identical to SEQ ID NO: 23631
  Probe

SEQ ID NO: 50359 - DNA, 19 bp, Artificial Sequence
  Probe
tcaaatcccggacgagccc

SEQ ID NO: 50360 - DNA, 20 bp, Artificial Sequence
  Probe
tcaaatcccggacgagcccc

SEQ ID NO: 50361 - DNA, 21 bp, Artificial Sequence
  Probe
tcaaatcccggacgagccccc

SEQ ID NO: 50362 - DNA, 22 bp, Artificial Sequence
  Probe
tcaaatcccggacgagccccct

SEQ ID NO: 50363 - DNA, 22 bp, Artificial Sequence
  Probe
tcaaatccgggtgccccctcaa

SEQ ID NO: 50364 - DNA, 19 bp, Artificial Sequence
  Probe
tcaaatctcggtgggacct

SEQ ID NO: 50365 - DNA, 24 bp, Artificial Sequence
  Probe
tcaacttaacttgaccgctctgag

SEQ ID NO: 50366 - DNA, 25 bp, Artificial Sequence
  Probe
tcaacttaacttgaccgctctgagc

SEQ ID NO: 50367 - DNA, 26 bp, Artificial Sequence
  Probe
tcaacttaacttgaccgctctgagct

SEQ ID NO: 50368 - DNA, 22 bp, Artificial Sequence
  Probe
tcaagtccctgttcgggcggca

SEQ ID NO: 50369 - DNA, 22 bp, Artificial Sequence
  Probe
tcaattccccgacggggaggtg

SEQ ID NO: 50370 - DNA, 22 bp, Artificial Sequence
  Probe
tcaattcccggtcagggaacca

SEQ ID NO: 50371 - DNA, 19 bp, Artificial Sequence
  Probe
tcacaagaactgctaactc

SEQ ID NO: 50372 - DNA, 20 bp, Artificial Sequence
  Probe
tcacaagaactgctaactca

SEQ ID NO: 50373 - DNA, 22 bp, Artificial Sequence
  Probe
tcacaagaactgctaactcatg

SEQ ID NO: 50374 - DNA, 49 bp, Artificial Sequence; identical to SEQ ID NO: 1609
  Probe

SEQ ID NO: 50375 - DNA, 19 bp, Artificial Sequence
  Probe
tcacacgcgaaaggtcccc

SEQ ID NO: 50376 - DNA, 41 bp, Artificial Sequence
  Probe
tcacacgcgaaaggtccccggttcgaaaccgggcggaaaca

SEQ ID NO: 50377 - DNA, 21 bp, Artificial Sequence
  Probe
tcacacggggcacaataattt

SEQ ID NO: 50378 - DNA, 16 bp, Artificial Sequence
  Probe
tcacatcaccccataa

SEQ ID NO: 50379 - DNA, 17 bp, Artificial Sequence
  Probe
tcacatcaccccataaa

SEQ ID NO: 50380 - DNA, 18 bp, Artificial Sequence
  Probe
tcacatcaccccataaac

SEQ ID NO: 50381 - DNA, 19 bp, Artificial Sequence
  Probe
tcacatcaccccataaaca

SEQ ID NO: 50382 - DNA, 20 bp, Artificial Sequence
  Probe
tcacatcaccccataaacaa

SEQ ID NO: 50383 - DNA, 21 bp, Artificial Sequence
  Probe
tcacatcaccccataaacaaa

SEQ ID NO: 50384 - DNA, 22 bp, Artificial Sequence
  Probe
tcacatcaccccataaacaaat

SEQ ID NO: 50385 - DNA, 38 bp, Artificial Sequence; identical to SEQ ID NO: 41697
  Probe

SEQ ID NO: 50386 - DNA, 41 bp, Artificial Sequence; identical to SEQ ID NO: 7674
  Probe

SEQ ID NO: 50387 - DNA, 41 bp, Artificial Sequence; identical to SEQ ID NO: 7677
  Probe

SEQ ID NO: 50388 - DNA, 41 bp, Artificial Sequence; identical to SEQ ID NO: 7682
  Probe

SEQ ID NO: 50389 - DNA, 18 bp, Artificial Sequence
  Probe
tcacgcgggagaccgggg

SEQ ID NO: 50390 - DNA, 19 bp, Artificial Sequence
  Probe
tcacgcgggagaccggggt

SEQ ID NO: 50391 - DNA, 21 bp, Artificial Sequence
  Probe
tcacgcgggagaccggggttc

SEQ ID NO: 50392 - DNA, 33 bp, Artificial Sequence; identical to SEQ ID NO: 1614
  Probe

SEQ ID NO: 50393 - DNA, 35 bp, Artificial Sequence; identical to SEQ ID NO: 7687
  Probe

SEQ ID NO: 50394 - DNA, 39 bp, Artificial Sequence; identical to SEQ ID NO: 7689
  Probe

SEQ ID NO: 50395 - DNA, 40 bp, Artificial Sequence; identical to SEQ ID NO: 7690
  Probe

SEQ ID NO: 50396 - DNA, 41 bp, Artificial Sequence; identical to SEQ ID NO: 7691
  Probe

SEQ ID NO: 50397 - DNA, 42 bp, Artificial Sequence; identical to SEQ ID NO: 7692
  Probe

SEQ ID NO: 50398 - DNA, 50 bp, Artificial Sequence
  Probe
tcacgcgggagaccggggttcaattccccgacggggaggtgtgtagctgc

SEQ ID NO: 50399 - DNA, 23 bp, Artificial Sequence
  Probe
tcacgcgggagaccggggttcga

SEQ ID NO: 50400 - DNA, 24 bp, Artificial Sequence
  Probe
tcacgcgggagaccggggttcgat

SEQ ID NO: 50401 - DNA, 31 bp, Artificial Sequence; identical to SEQ ID NO: 7697
  Probe

SEQ ID NO: 50402 - DNA, 32 bp, Artificial Sequence; identical to SEQ ID NO: 1618
  Probe

SEQ ID NO: 50403 - DNA, 39 bp, Artificial Sequence; identical to SEQ ID NO: 7699
  Probe

SEQ ID NO: 50404 - DNA, 40 bp, Artificial Sequence; identical to SEQ ID NO: 7700
  Probe

SEQ ID NO: 50405 - DNA, 41 bp, Artificial Sequence; identical to SEQ ID NO: 7701
  Probe

SEQ ID NO: 50406 - DNA, 42 bp, Artificial Sequence; identical to SEQ ID NO: 7702
  Probe

SEQ ID NO: 50407 - DNA, 43 bp, Artificial Sequence; identical to SEQ ID NO: 7703
  Probe

SEQ ID NO: 50408 - DNA, 49 bp, Artificial Sequence; identical to SEQ ID NO: 7704
  Probe

SEQ ID NO: 50409 - DNA, 50 bp, Artificial Sequence; identical to SEQ ID NO: 7705
  Probe

SEQ ID NO: 50410 - DNA, 40 bp, Artificial Sequence; identical to SEQ ID NO: 7706
  Probe

SEQ ID NO: 50411 - DNA, 41 bp, Artificial Sequence; identical to SEQ ID NO: 7707
  Probe

SEQ ID NO: 50412 - DNA, 42 bp, Artificial Sequence
  Probe
tcacgcgggagaccggggttcgattccccgacggggagacga

SEQ ID NO: 50413 - DNA, 43 bp, Artificial Sequence
  Probe
tcacgcgggagaccggggttcgattccccgacggggagacgaa

SEQ ID NO: 50414 - DNA, 40 bp, Artificial Sequence; identical to SEQ ID NO: 7708
  Probe

SEQ ID NO: 50415 - DNA, 41 bp, Artificial Sequence; identical to SEQ ID NO: 7709
  Probe

SEQ ID NO: 50416 - DNA, 42 bp, Artificial Sequence; identical to SEQ ID NO: 7710
  Probe

SEQ ID NO: 50417 - DNA, 39 bp, Artificial Sequence; identical to SEQ ID NO: 7711
  Probe

SEQ ID NO: 50418 - DNA, 40 bp, Artificial Sequence; identical to SEQ ID NO: 7712
  Probe

SEQ ID NO: 50419 - DNA, 41 bp, Artificial Sequence
  Probe
tcacgcgggagaccggggttcgattccccgacggggaggag

SEQ ID NO: 50420 - DNA, 43 bp, Artificial Sequence; identical to SEQ ID NO: 7714
  Probe

SEQ ID NO: 50421 - DNA, 40 bp, Artificial Sequence; identical to SEQ ID NO: 7715
  Probe

SEQ ID NO: 50422 - DNA, 41 bp, Artificial Sequence; identical to SEQ ID NO: 7716
  Probe

SEQ ID NO: 50423 - DNA, 42 bp, Artificial Sequence; identical to SEQ ID NO: 7717
  Probe

SEQ ID NO: 50424 - DNA, 49 bp, Artificial Sequence; identical to SEQ ID NO: 7719
  Probe

SEQ ID NO: 50425 - DNA, 50 bp, Artificial Sequence; identical to SEQ ID NO: 7720
  Probe

SEQ ID NO: 50426 - DNA, 42 bp, Artificial Sequence; identical to SEQ ID NO: 7721
  Probe

SEQ ID NO: 50427 - DNA, 43 bp, Artificial Sequence
  Probe
tcacgcgggagaccggggttcgattccccgacggggaggcagc

SEQ ID NO: 50428 - DNA, 44 bp, Artificial Sequence; identical to SEQ ID NO: 7722
  Probe

SEQ ID NO: 50429 - DNA, 41 bp, Artificial Sequence; identical to SEQ ID NO: 7723
  Probe

SEQ ID NO: 50430 - DNA, 42 bp, Artificial Sequence
  Probe
tcacgcgggagaccggggttcgattccccgacggggaggcca

SEQ ID NO: 50431 - DNA, 43 bp, Artificial Sequence
  Probe
tcacgcgggagaccggggttcgattccccgacggggaggccaa

SEQ ID NO: 50432 - DNA, 50 bp, Artificial Sequence; identical to SEQ ID NO: 41724
  Probe

SEQ ID NO: 50433 - DNA, 42 bp, Artificial Sequence; identical to SEQ ID NO: 7724
  Probe

SEQ ID NO: 50434 - DNA, 43 bp, Artificial Sequence; identical to SEQ ID NO: 7725
  Probe

SEQ ID NO: 50435 - DNA, 44 bp, Artificial Sequence; identical to SEQ ID NO: 7726
  Probe

SEQ ID NO: 50436 - DNA, 45 bp, Artificial Sequence; identical to SEQ ID NO: 7727
  Probe

SEQ ID NO: 50437 - DNA, 50 bp, Artificial Sequence; identical to SEQ ID NO: 41725
  Probe

SEQ ID NO: 50438 - DNA, 33 bp, Artificial Sequence; identical to SEQ ID NO: 7728
  Probe

SEQ ID NO: 50439 - DNA, 33 bp, Artificial Sequence; identical to SEQ ID NO: 1624
  Probe

SEQ ID NO: 50440 - DNA, 33 bp, Artificial Sequence; identical to SEQ ID NO: 23699
  Probe

SEQ ID NO: 50441 - DNA, 35 bp, Artificial Sequence; identical to SEQ ID NO: 41729
  Probe

SEQ ID NO: 50442 - DNA, 38 bp, Artificial Sequence; identical to SEQ ID NO: 23705
  Probe

SEQ ID NO: 50443 - DNA, 50 bp, Artificial Sequence; identical to SEQ ID NO: 7731
  Probe

SEQ ID NO: 50444 - DNA, 27 bp, Artificial Sequence
  Probe
tcagctaaataagctatcgggcccata

SEQ ID NO: 50445 - DNA, 37 bp, Artificial Sequence; identical to SEQ ID NO: 7737
  Probe

SEQ ID NO: 50446 - DNA, 28 bp, Artificial Sequence
  Probe
tcagggatgggttcgattctcatagtcc

SEQ ID NO: 50447 - DNA, 32 bp, Artificial Sequence; identical to SEQ ID NO: 23722
  Probe

SEQ ID NO: 50448 - DNA, 33 bp, Artificial Sequence
  Probe
tcagggtcgtgggttcgagccccacgttgggcg

SEQ ID NO: 50449 - DNA, 20 bp, Artificial Sequence
  Probe
tcagtggtagaattctcgcc

SEQ ID NO: 50450 - DNA, 37 bp, Artificial Sequence; identical to SEQ ID NO: 7747
  Probe

SEQ ID NO: 50451 - DNA, 29 bp, Artificial Sequence
  Probe
tcatattgaattgcaaattcgaagaagca

SEQ ID NO: 50452 - DNA, 50 bp, Artificial Sequence; identical to SEQ ID NO: 7753
  Probe

SEQ ID NO: 50453 - DNA, 50 bp, Artificial Sequence
  Probe
tcatgcaagattcccattcttgcgacccgggttcgattcccgggcggcgc

SEQ ID NO: 50454 - DNA, 27 bp, Artificial Sequence
  Probe
tcatgcccccatgtctaacaacatggc

SEQ ID NO: 50455 - DNA, 28 bp, Artificial Sequence
  Probe
tcatgcccccatgtctaacaacatggct

SEQ ID NO: 50456 - DNA, 29 bp, Artificial Sequence
  Probe
tcatgcccccatgtctaacaacatggctt

SEQ ID NO: 50457 - DNA, 30 bp, Artificial Sequence; identical to SEQ ID NO: 7761
  Probe

SEQ ID NO: 50458 - DNA, 31 bp, Artificial Sequence; identical to SEQ ID NO: 7762
  Probe

SEQ ID NO: 50459 - DNA, 32 bp, Artificial Sequence; identical to SEQ ID NO: 7763
  Probe

SEQ ID NO: 50460 - DNA, 33 bp, Artificial Sequence; identical to SEQ ID NO: 7764
  Probe

SEQ ID NO: 50461 - DNA, 34 bp, Artificial Sequence; identical to SEQ ID NO: 7765
  Probe

SEQ ID NO: 50462 - DNA, 36 bp, Artificial Sequence; identical to SEQ ID NO: 7767
  Probe

SEQ ID NO: 50463 - DNA, 37 bp, Artificial Sequence; identical to SEQ ID NO: 7768
  Probe

SEQ ID NO: 50464 - DNA, 33 bp, Artificial Sequence; identical to SEQ ID NO: 7769
  Probe

SEQ ID NO: 50465 - DNA, 21 bp, Artificial Sequence
  Probe
tcattggtcgtggttgtagtc

SEQ ID NO: 50466 - DNA, 22 bp, Artificial Sequence
  Probe
tcattggtcgtggttgtagtcc

SEQ ID NO: 50467 - DNA, 26 bp, Artificial Sequence
  Probe
tcattggtcgtggttgtagtccgtgc

SEQ ID NO: 50468 - DNA, 31 bp, Artificial Sequence; identical to SEQ ID NO: 23753
  Probe

SEQ ID NO: 50469 - DNA, 32 bp, Artificial Sequence; identical to SEQ ID NO: 25723
  Probe

SEQ ID NO: 50470 - DNA, 33 bp, Artificial Sequence; identical to SEQ ID NO: 7770
  Probe

SEQ ID NO: 50471 - DNA, 42 bp, Artificial Sequence; identical to SEQ ID NO: 23758
  Probe

SEQ ID NO: 50472 - DNA, 42 bp, Artificial Sequence; identical to SEQ ID NO: 23759
  Probe

SEQ ID NO: 50473 - DNA, 22 bp, Artificial Sequence
  Probe
tccaatgggggttccccgcgca

SEQ ID NO: 50474 - DNA, 25 bp, Artificial Sequence
  Probe
tccaatgggggttccccgcgcaggt

SEQ ID NO: 50475 - DNA, 22 bp, Artificial Sequence
  Probe
tccaatggggtctccccgcgca

SEQ ID NO: 50476 - DNA, 25 bp, Artificial Sequence
  Probe
tccaatggggtctccccgcgcaggt

SEQ ID NO: 50477 - DNA, 22 bp, Artificial Sequence
  Probe
tccaatggggtttccccgcaca

SEQ ID NO: 50478 - DNA, 25 bp, Artificial Sequence
  Probe
tccaatggggtttccccgcacaggt

SEQ ID NO: 50479 - DNA, 21 bp, Artificial Sequence
  Probe
tccaattaactagttttgaca

SEQ ID NO: 50480 - DNA, 39 bp, Artificial Sequence; identical to SEQ ID NO: 7775
  Probe

SEQ ID NO: 50481 - DNA, 40 bp, Artificial Sequence; identical to SEQ ID NO: 7776
  Probe

SEQ ID NO: 50482 - DNA, 41 bp, Artificial Sequence; identical to SEQ ID NO: 7777
  Probe

SEQ ID NO: 50483 - DNA, 32 bp, Artificial Sequence; identical to SEQ ID NO: 7779
  Probe

SEQ ID NO: 50484 - DNA, 33 bp, Artificial Sequence; identical to SEQ ID NO: 7780
  Probe

SEQ ID NO: 50485 - DNA, 35 bp, Artificial Sequence; identical to SEQ ID NO: 23786
  Probe

SEQ ID NO: 50486 - DNA, 36 bp, Artificial Sequence; identical to SEQ ID NO: 23787
  Probe

SEQ ID NO: 50487 - DNA, 37 bp, Artificial Sequence; identical to SEQ ID NO: 7781
  Probe

SEQ ID NO: 50488 - DNA, 35 bp, Artificial Sequence; identical to SEQ ID NO: 23789
  Probe

SEQ ID NO: 50489 - DNA, 31 bp, Artificial Sequence; identical to SEQ ID NO: 23790
  Probe

SEQ ID NO: 50490 - DNA, 32 bp, Artificial Sequence; identical to SEQ ID NO: 23791
  Probe

SEQ ID NO: 50491 - DNA, 35 bp, Artificial Sequence; identical to SEQ ID NO: 7782
  Probe

SEQ ID NO: 50492 - DNA, 37 bp, Artificial Sequence; identical to SEQ ID NO: 7783
  Probe

SEQ ID NO: 50493 - DNA, 27 bp, Artificial Sequence
  Probe
tccagggttcaagtccctgttcaggca

SEQ ID NO: 50494 - DNA, 26 bp, Artificial Sequence
  Probe
tccagggttcaagtccctgttcgggc

SEQ ID NO: 50495 - DNA, 28 bp, Artificial Sequence
  Probe
tccagggttcaagtccctgttcgggcgg

SEQ ID NO: 50496 - DNA, 28 bp, Artificial Sequence
  Probe
tccagggttcaagtccctgttcgggcgt

SEQ ID NO: 50497 - DNA, 24 bp, Artificial Sequence
  Probe
tccaggttcgactcctggctggct

SEQ ID NO: 50498 - DNA, 26 bp, Artificial Sequence
  Probe
tccaggttcgactcctggctggctcg

SEQ ID NO: 50499 - DNA, 28 bp, Artificial Sequence
  Probe
tccatagtgtagtggttatcacgtctgc

SEQ ID NO: 50500 - DNA, 25 bp, Artificial Sequence
  Probe
tccattggggtctccccgcgcaggt

SEQ ID NO: 50501 - DNA, 21 bp, Artificial Sequence
  Probe
tccattggggtttccccgcgc

SEQ ID NO: 50502 - DNA, 22 bp, Artificial Sequence
  Probe
tccattggggtttccccgcgca

SEQ ID NO: 50503 - DNA, 26 bp, Artificial Sequence
  Probe
tccattggggtttccccgcgcaggtt

SEQ ID NO: 50504 - DNA, 27 bp, Artificial Sequence
  Probe
tccattggggtttccccgcgcaggttc

SEQ ID NO: 50505 - DNA, 44 bp, Artificial Sequence; identical to SEQ ID NO: 23813
  Probe

SEQ ID NO: 50506 - DNA, 16 bp, Artificial Sequence
  Probe
tcccacatggtctagc

SEQ ID NO: 50507 - DNA, 17 bp, Artificial Sequence
  Probe
tcccacatggtctagcg

SEQ ID NO: 50508 - DNA, 20 bp, Artificial Sequence
  Probe
tcccacatggtctagcggtt

SEQ ID NO: 50509 - DNA, 21 bp, Artificial Sequence
  Probe
tcccacatggtctagcggtta

SEQ ID NO: 50510 - DNA, 25 bp, Artificial Sequence
  Probe
tcccacatggtctagcggttaggat

SEQ ID NO: 50511 - DNA, 49 bp, Artificial Sequence; identical to SEQ ID NO: 7797
  Probe

SEQ ID NO: 50512 - DNA, 33 bp, Artificial Sequence; identical to SEQ ID NO: 23829
  Probe

SEQ ID NO: 50513 - DNA, 16 bp, Artificial Sequence
  Probe
tcccatatggtctagc

SEQ ID NO: 50514 - DNA, 17 bp, Artificial Sequence
  Probe
tcccatatggtctagcg

SEQ ID NO: 50515 - DNA, 22 bp, Artificial Sequence
  Probe
tcccatatggtctagcggttag

SEQ ID NO: 50516 - DNA, 24 bp, Artificial Sequence
  Probe
tcccatatggtctagcggttagga

SEQ ID NO: 50517 - DNA, 25 bp, Artificial Sequence
  Probe
tcccatatggtctagcggttaggat

SEQ ID NO: 50518 - DNA, 28 bp, Artificial Sequence
  Probe
tcccatatggtctagcggttaggattcc

SEQ ID NO: 50519 - DNA, 37 bp, Artificial Sequence; identical to SEQ ID NO: 1666
  Probe

SEQ ID NO: 50520 - DNA, 39 bp, Artificial Sequence; identical to SEQ ID NO: 7803
  Probe

SEQ ID NO: 50521 - DNA, 49 bp, Artificial Sequence; identical to SEQ ID NO: 23834
  Probe

SEQ ID NO: 50522 - DNA, 50 bp, Artificial Sequence; identical to SEQ ID NO: 7805
  Probe

SEQ ID NO: 50523 - DNA, 26 bp, Artificial Sequence
  Probe
tcccatctggggtggcctgtgacttt

SEQ ID NO: 50524 - DNA, 30 bp, Artificial Sequence; identical to SEQ ID NO: 23838
  Probe

SEQ ID NO: 50525 - DNA, 50 bp, Artificial Sequence; identical to SEQ ID NO: 7808
  Probe

SEQ ID NO: 50526 - DNA, 50 bp, Artificial Sequence; identical to SEQ ID NO: 7809
  Probe

SEQ ID NO: 50527 - DNA, 21 bp, Artificial Sequence
  Probe
tccccgcgcaggttcgaatcc

SEQ ID NO: 50528 - DNA, 22 bp, Artificial Sequence
  Probe
tccccgcgcaggttcgaatcct

SEQ ID NO: 50529 - DNA, 29 bp, Artificial Sequence
  Probe
tccccgcgcaggttcgaatcctgccgact

SEQ ID NO: 50530 - DNA, 30 bp, Artificial Sequence
  Probe
tccccgcgcaggttcgaatcctgccgacta

SEQ ID NO: 50531 - DNA, 32 bp, Artificial Sequence
  Probe
tccccgcgcaggttcgaatcctgccgactacg

SEQ ID NO: 50532 - DNA, 30 bp, Artificial Sequence
  Probe
tccccgcgcaggttcgaatcctgctcacag

SEQ ID NO: 50533 - DNA, 32 bp, Artificial Sequence
  Probe
tccccgcgcaggttcgaatcctgctcacagcg

SEQ ID NO: 50534 - DNA, 18 bp, Artificial Sequence
  Probe
tccccggcacctccaaac

SEQ ID NO: 50535 - DNA, 20 bp, Artificial Sequence
  Probe
tccccggcacctccaaacgg

SEQ ID NO: 50536 - DNA, 19 bp, Artificial Sequence
  Probe
tccccggcacctccaccag

SEQ ID NO: 50537 - DNA, 20 bp, Artificial Sequence
  Probe
tccccggcacctccaccagt

SEQ ID NO: 50538 - DNA, 21 bp, Artificial Sequence
  Probe
tccccggcacctccaccagtt

SEQ ID NO: 50539 - DNA, 22 bp, Artificial Sequence
  Probe
tccccggcacctccaccagttt

SEQ ID NO: 50540 - DNA, 23 bp, Artificial Sequence
  Probe
tccccggcacctccaccagtttt

SEQ ID NO: 50541 - DNA, 18 bp, Artificial Sequence
  Probe
tccccggcatctccattg

SEQ ID NO: 50542 - DNA, 23 bp, Artificial Sequence
  Probe
tccccggcatctccattgtagtt

SEQ ID NO: 50543 - DNA, 28 bp, Artificial Sequence
  Probe
tccccttggtctagtggttaggattcaa

SEQ ID NO: 50544 - DNA, 16 bp, Artificial Sequence
  Probe
tcccgccttttttccc

SEQ ID NO: 50545 - DNA, 17 bp, Artificial Sequence
  Probe
tcccgccttttttcccg

SEQ ID NO: 50546 - DNA, 18 bp, Artificial Sequence
  Probe
tcccgccttttttcccgg

SEQ ID NO: 50547 - DNA, 19 bp, Artificial Sequence
  Probe
tcccgccttttttcccggc

SEQ ID NO: 50548 - DNA, 20 bp, Artificial Sequence
  Probe
tcccgccttttttcccggcg

SEQ ID NO: 50549 - DNA, 22 bp, Artificial Sequence
  Probe
tcccgccttttttcccggcggc

SEQ ID NO: 50550 - DNA, 23 bp, Artificial Sequence
  Probe
tcccgccttttttcccggcggcg

SEQ ID NO: 50551 - DNA, 24 bp, Artificial Sequence
  Probe
tcccgccttttttcccggcggcgg

SEQ ID NO: 50552 - DNA, 25 bp, Artificial Sequence
  Probe
tcccgccttttttcccggcggcggg

SEQ ID NO: 50553 - DNA, 26 bp, Artificial Sequence
  Probe
tcccgccttttttcccggcggcggga

SEQ ID NO: 50554 - DNA, 27 bp, Artificial Sequence
  Probe
tcccgccttttttcccggcggcgggag

SEQ ID NO: 50555 - DNA, 28 bp, Artificial Sequence
  Probe
tcccgccttttttcccggcggcgggaga

SEQ ID NO: 50556 - DNA, 29 bp, Artificial Sequence
  Probe
tcccgccttttttcccggcggcgggagaa

SEQ ID NO: 50557 - DNA, 30 bp, Artificial Sequence; identical to SEQ ID NO: 7829
  Probe

SEQ ID NO: 50558 - DNA, 31 bp, Artificial Sequence; identical to SEQ ID NO: 7830
  Probe

SEQ ID NO: 50559 - DNA, 32 bp, Artificial Sequence; identical to SEQ ID NO: 7831
  Probe

SEQ ID NO: 50560 - DNA, 33 bp, Artificial Sequence; identical to SEQ ID NO: 7832
  Probe

SEQ ID NO: 50561 - DNA, 36 bp, Artificial Sequence; identical to SEQ ID NO: 23877
  Probe

SEQ ID NO: 50562 - DNA, 37 bp, Artificial Sequence; identical to SEQ ID NO: 23878
  Probe

SEQ ID NO: 50563 - DNA, 38 bp, Artificial Sequence
  Probe
tcccgccttttttcccggcggcgggagaagtagattga

SEQ ID NO: 50564 - DNA, 16 bp, Artificial Sequence
  Probe
tcccggacgagccccc

SEQ ID NO: 50565 - DNA, 27 bp, Artificial Sequence
  Probe
tcccgggttcaaatcccggacgagccc

SEQ ID NO: 50566 - DNA, 30 bp, Artificial Sequence
  Probe
tcccgggttcaaatcccggacgagccccct

SEQ ID NO: 50567 - DNA, 27 bp, Artificial Sequence
  Probe
tcccgggttcaatccccggcacctcca

SEQ ID NO: 50568 - DNA, 29 bp, Artificial Sequence
  Probe
tcccgggttcaatccccggcacctccacc

SEQ ID NO: 50569 - DNA, 30 bp, Artificial Sequence; identical to SEQ ID NO: 7835
  Probe

SEQ ID NO: 50570 - DNA, 27 bp, Artificial Sequence
  Probe
tcccgggttcaatccccggcatctcca

SEQ ID NO: 50571 - DNA, 26 bp, Artificial Sequence
  Probe
tcccgggttcgatccccagcatctcc

SEQ ID NO: 50572 - DNA, 28 bp, Artificial Sequence
  Probe
tcccgggttcgatccccagcatctccag

SEQ ID NO: 50573 - DNA, 30 bp, Artificial Sequence; identical to SEQ ID NO: 41801
  Probe

SEQ ID NO: 50574 - DNA, 27 bp, Artificial Sequence
  Probe
tcccgggttcgatccccggcatctcca

SEQ ID NO: 50575 - DNA, 17 bp, Artificial Sequence
  Probe
tcccggtcagggaacca

SEQ ID NO: 50576 - DNA, 26 bp, Artificial Sequence
  Probe
tccctggtctagtggttaggatttat

SEQ ID NO: 50577 - DNA, 27 bp, Artificial Sequence
  Probe
tccctggtctagtggttaggatttatt

SEQ ID NO: 50578 - DNA, 28 bp, Artificial Sequence
  Probe
tccctggtctagtggttaggatttatta

SEQ ID NO: 50579 - DNA, 29 bp, Artificial Sequence
  Probe
tccctggtctagtggttaggatttattat

SEQ ID NO: 50580 - DNA, 29 bp, Artificial Sequence
  Probe
tccctggtggtctaatggttaggagtcgg

SEQ ID NO: 50581 - DNA, 16 bp, Artificial Sequence
  Probe
tccctggtggtctagt

SEQ ID NO: 50582 - DNA, 17 bp, Artificial Sequence
  Probe
tccctggtggtctagtg

SEQ ID NO: 50583 - DNA, 18 bp, Artificial Sequence
  Probe
tccctggtggtctagtgg

SEQ ID NO: 50584 - DNA, 20 bp, Artificial Sequence
  Probe
tccctggtggtctagtggct

SEQ ID NO: 50585 - DNA, 23 bp, Artificial Sequence
  Probe
tccctggtggtctagtggctagg

SEQ ID NO: 50586 - DNA, 24 bp, Artificial Sequence
  Probe
tccctggtggtctagtggctagga

SEQ ID NO: 50587 - DNA, 25 bp, Artificial Sequence
  Probe
tccctggtggtctagtggctaggat

SEQ ID NO: 50588 - DNA, 26 bp, Artificial Sequence
  Probe
tccctggtggtctagtggctaggatt

SEQ ID NO: 50589 - DNA, 27 bp, Artificial Sequence
  Probe
tccctggtggtctagtggctaggattc

SEQ ID NO: 50590 - DNA, 28 bp, Artificial Sequence
  Probe
tccctggtggtctagtggctaggattcg

SEQ ID NO: 50591 - DNA, 29 bp, Artificial Sequence
  Probe
tccctggtggtctagtggctaggattcgg

SEQ ID NO: 50592 - DNA, 37 bp, Artificial Sequence; identical to SEQ ID NO: 1677
  Probe

SEQ ID NO: 50593 - DNA, 39 bp, Artificial Sequence; identical to SEQ ID NO: 7857
  Probe

SEQ ID NO: 50594 - DNA, 50 bp, Artificial Sequence; identical to SEQ ID NO: 1678
  Probe

SEQ ID NO: 50595 - DNA, 19 bp, Artificial Sequence
  Probe
tccctggtggtctagtggt

SEQ ID NO: 50596 - DNA, 20 bp, Artificial Sequence
  Probe
tccctggtggtctagtggtt

SEQ ID NO: 50597 - DNA, 21 bp, Artificial Sequence
  Probe
tccctggtggtctagtggtta

SEQ ID NO: 50598 - DNA, 22 bp, Artificial Sequence
  Probe
tccctggtggtctagtggttag

SEQ ID NO: 50599 - DNA, 23 bp, Artificial Sequence
  Probe
tccctggtggtctagtggttagg

SEQ ID NO: 50600 - DNA, 24 bp, Artificial Sequence
  Probe
tccctggtggtctagtggttagga

SEQ ID NO: 50601 - DNA, 25 bp, Artificial Sequence
  Probe
tccctggtggtctagtggttaggat

SEQ ID NO: 50602 - DNA, 26 bp, Artificial Sequence
  Probe
tccctggtggtctagtggttaggatt

SEQ ID NO: 50603 - DNA, 27 bp, Artificial Sequence
  Probe
tccctggtggtctagtggttaggattc

SEQ ID NO: 50604 - DNA, 28 bp, Artificial Sequence
  Probe
tccctggtggtctagtggttaggattcg

SEQ ID NO: 50605 - DNA, 29 bp, Artificial Sequence
  Probe
tccctggtggtctagtggttaggattcgg

SEQ ID NO: 50606 - DNA, 30 bp, Artificial Sequence; identical to SEQ ID NO: 7870
  Probe

SEQ ID NO: 50607 - DNA, 38 bp, Artificial Sequence; identical to SEQ ID NO: 1686
  Probe

SEQ ID NO: 50608 - DNA, 42 bp, Artificial Sequence; identical to SEQ ID NO: 1689
  Probe

SEQ ID NO: 50609 - DNA, 44 bp, Artificial Sequence; identical to SEQ ID NO: 7873
  Probe

SEQ ID NO: 50610 - DNA, 45 bp, Artificial Sequence; identical to SEQ ID NO: 7874
  Probe

SEQ ID NO: 50611 - DNA, 46 bp, Artificial Sequence; identical to SEQ ID NO: 7875
  Probe

SEQ ID NO: 50612 - DNA, 48 bp, Artificial Sequence; identical to SEQ ID NO: 7877
  Probe

SEQ ID NO: 50613 - DNA, 26 bp, Artificial Sequence
  Probe
tccctggttcgatcccgggtttcggc

SEQ ID NO: 50614 - DNA, 28 bp, Artificial Sequence
  Probe
tccctggttcgatcccgggtttcggcac

SEQ ID NO: 50615 - DNA, 29 bp, Artificial Sequence
  Probe
tccctggttcgatcccgggtttcggcact

SEQ ID NO: 50616 - DNA, 30 bp, Artificial Sequence
  Probe
tccctggttcgatcccgggtttcggcactt

SEQ ID NO: 50617 - DNA, 30 bp, Artificial Sequence
  Probe
tccctggttcgatcccgggtttcggcagct

SEQ ID NO: 50618 - DNA, 37 bp, Artificial Sequence
  Probe
tccgagaggtcccgggttcaaatcccggacgagcccc

SEQ ID NO: 50619 - DNA, 30 bp, Artificial Sequence; identical to SEQ ID NO: 14328
  Probe

SEQ ID NO: 50620 - DNA, 33 bp, Artificial Sequence; identical to SEQ ID NO: 7886
  Probe

SEQ ID NO: 50621 - DNA, 25 bp, Artificial Sequence
  Probe
tccgtagtgtagtggttatcacgtt

SEQ ID NO: 50622 - DNA, 28 bp, Artificial Sequence
  Probe
tccgtagtgtagtggttatcacgttcgc

SEQ ID NO: 50623 - DNA, 29 bp, Artificial Sequence
  Probe
tccgtagtgtagtggttatcacgttcgcc

SEQ ID NO: 50624 - DNA, 30 bp, Artificial Sequence; identical to SEQ ID NO: 7893
  Probe

SEQ ID NO: 50625 - DNA, 31 bp, Artificial Sequence; identical to SEQ ID NO: 7895
  Probe

SEQ ID NO: 50626 - DNA, 32 bp, Artificial Sequence; identical to SEQ ID NO: 7896
  Probe

SEQ ID NO: 50627 - DNA, 50 bp, Artificial Sequence; identical to SEQ ID NO: 7899
  Probe

SEQ ID NO: 50628 - DNA, 33 bp, Artificial Sequence; identical to SEQ ID NO: 7900
  Probe

SEQ ID NO: 50629 - DNA, 39 bp, Artificial Sequence
  Probe
tcctaagccagggattgtgggttcgagtcccatctgggg

SEQ ID NO: 50630 - DNA, 41 bp, Artificial Sequence
  Probe
tcctaagccagggattgtgggttcgagtcccatctggggtg

SEQ ID NO: 50631 - DNA, 42 bp, Artificial Sequence
  Probe
tcctaagccagggattgtgggttcgagtcccatctggggtgg

SEQ ID NO: 50632 - DNA, 43 bp, Artificial Sequence; identical to SEQ ID NO: 7904
  Probe

SEQ ID NO: 50633 - DNA, 44 bp, Artificial Sequence; identical to SEQ ID NO: 7905
  Probe

SEQ ID NO: 50634 - DNA, 19 bp, Artificial Sequence
  Probe
tcctagcctttctattagc

SEQ ID NO: 50635 - DNA, 16 bp, Artificial Sequence
  Probe
tcctcaaagcaataca

SEQ ID NO: 50636 - DNA, 18 bp, Artificial Sequence
  Probe
tcctcaaagcaatacact

SEQ ID NO: 50637 - DNA, 33 bp, Artificial Sequence; identical to SEQ ID NO: 23983
  Probe

SEQ ID NO: 50638 - DNA, 32 bp, Artificial Sequence; identical to SEQ ID NO: 7912
  Probe

SEQ ID NO: 50639 - DNA, 35 bp, Artificial Sequence; identical to SEQ ID NO: 23986
  Probe

SEQ ID NO: 50640 - DNA, 36 bp, Artificial Sequence; identical to SEQ ID NO: 7913
  Probe

SEQ ID NO: 50641 - DNA, 18 bp, Artificial Sequence
  Probe
tcctcgctggggcctcct

SEQ ID NO: 50642 - DNA, 17 bp, Artificial Sequence
  Probe
tcctcgttagtatagtg

SEQ ID NO: 50643 - DNA, 18 bp, Artificial Sequence
  Probe
tcctcgttagtatagtgg

SEQ ID NO: 50644 - DNA, 19 bp, Artificial Sequence
  Probe
tcctcgttagtatagtggt

SEQ ID NO: 50645 - DNA, 20 bp, Artificial Sequence
  Probe
tcctcgttagtatagtggtg

SEQ ID NO: 50646 - DNA, 21 bp, Artificial Sequence
  Probe
tcctcgttagtatagtggtga

SEQ ID NO: 50647 - DNA, 24 bp, Artificial Sequence
  Probe
tcctcgttagtatagtggtgagta

SEQ ID NO: 50648 - DNA, 25 bp, Artificial Sequence
  Probe
tcctcgttagtatagtggtgagtat

SEQ ID NO: 50649 - DNA, 29 bp, Artificial Sequence
  Probe
tcctcgttagtatagtggtgagtatcccc

SEQ ID NO: 50650 - DNA, 40 bp, Artificial Sequence; identical to SEQ ID NO: 7922
  Probe

SEQ ID NO: 50651 - DNA, 41 bp, Artificial Sequence; identical to SEQ ID NO: 7923
  Probe

SEQ ID NO: 50652 - DNA, 24 bp, Artificial Sequence
  Probe
tcctcgttagtatagtggtgagtg

SEQ ID NO: 50653 - DNA, 20 bp, Artificial Sequence
  Probe
tcctcgttagtatagtggtt

SEQ ID NO: 50654 - DNA, 22 bp, Artificial Sequence
  Probe
tcctcgttagtatagtggttag

SEQ ID NO: 50655 - DNA, 23 bp, Artificial Sequence
  Probe
tcctcgttagtatagtggttagt

SEQ ID NO: 50656 - DNA, 26 bp, Artificial Sequence
  Probe
tcctcgttagtatagtggttagtatc

SEQ ID NO: 50657 - DNA, 29 bp, Artificial Sequence
  Probe
tcctcgttagtatagtggttagtatcccc

SEQ ID NO: 50658 - DNA, 31 bp, Artificial Sequence; identical to SEQ ID NO: 37386
  Probe

SEQ ID NO: 50659 - DNA, 27 bp, Artificial Sequence
  Probe
tcctgagttcgaacctcagagggggca

SEQ ID NO: 50660 - DNA, 30 bp, Artificial Sequence
  Probe
tcctgagttcgaacctcagagggggcaagg

SEQ ID NO: 50661 - DNA, 30 bp, Artificial Sequence
  Probe
tcctgagttcgaacctcagagggggcagct

SEQ ID NO: 50662 - DNA, 22 bp, Artificial Sequence
  Probe
tcgaaaccatcctctgctaggt

SEQ ID NO: 50663 - DNA, 21 bp, Artificial Sequence
  Probe
tcgaaaccatcctctgctatc

SEQ ID NO: 50664 - DNA, 21 bp, Artificial Sequence
  Probe
tcgaaaccatcctctgctatt

SEQ ID NO: 50665 - DNA, 19 bp, Artificial Sequence
  Probe
tcgaaaccgggcggaaaca

SEQ ID NO: 50666 - DNA, 22 bp, Artificial Sequence
  Probe
tcgaaaccgggcggaaacacct

SEQ ID NO: 50667 - DNA, 22 bp, Artificial Sequence
  Probe
tcgaaccccgtccgtgcctgat

SEQ ID NO: 50668 - DNA, 28 bp, Artificial Sequence
  Probe
tcgaagaagcagcttcaaacctgccggg

SEQ ID NO: 50669 - DNA, 29 bp, Artificial Sequence
  Probe
tcgaagaagcagcttcaaacctgccgggg

SEQ ID NO: 50670 - DNA, 31 bp, Artificial Sequence; identical to SEQ ID NO: 7937
  Probe

SEQ ID NO: 50671 - DNA, 32 bp, Artificial Sequence; identical to SEQ ID NO: 7938
  Probe

SEQ ID NO: 50672 - DNA, 34 bp, Artificial Sequence; identical to SEQ ID NO: 7940
  Probe

SEQ ID NO: 50673 - DNA, 35 bp, Artificial Sequence; identical to SEQ ID NO: 7941
  Probe

SEQ ID NO: 50674 - DNA, 21 bp, Artificial Sequence
  Probe
tcgaatcccaccgctgccaca

SEQ ID NO: 50675 - DNA, 22 bp, Artificial Sequence
  Probe
tcgaatcccaccgctgccacac

SEQ ID NO: 50676 - DNA, 22 bp, Artificial Sequence
  Probe
tcgaatcccaccgctgccaggt

SEQ ID NO: 50677 - DNA, 19 bp, Artificial Sequence
  Probe
tcgaatcccacttctgaca

SEQ ID NO: 50678 - DNA, 22 bp, Artificial Sequence
  Probe
tcgaatcccacttctgacacaa

SEQ ID NO: 50679 - DNA, 22 bp, Artificial Sequence
  Probe
tcgaatcccagcggtgcctccg

SEQ ID NO: 50680 - DNA, 17 bp, Artificial Sequence
  Probe
tcgaatcccatcctcgt

SEQ ID NO: 50681 - DNA, 19 bp, Artificial Sequence
  Probe
tcgaatcccatcctcgtcg

SEQ ID NO: 50682 - DNA, 20 bp, Artificial Sequence
  Probe
tcgaatcccatcctcgtcgc

SEQ ID NO: 50683 - DNA, 21 bp, Artificial Sequence
  Probe
tcgaatcccatcctcgtcgct

SEQ ID NO: 50684 - DNA, 20 bp, Artificial Sequence
  Probe
tcgaatccgagtcacggcaa

SEQ ID NO: 50685 - DNA, 21 bp, Artificial Sequence
  Probe
tcgaatccgagtcacggcaaa

SEQ ID NO: 50686 - DNA, 20 bp, Artificial Sequence
  Probe
tcgaatccgagtcacggcag

SEQ ID NO: 50687 - DNA, 22 bp, Artificial Sequence
  Probe
tcgaatccgagtcacggcaggt

SEQ ID NO: 50688 - DNA, 20 bp, Artificial Sequence
  Probe
tcgaatccgagtcacggcat

SEQ ID NO: 50689 - DNA, 22 bp, Artificial Sequence
  Probe
tcgaatccgagtcacggcattg

SEQ ID NO: 50690 - DNA, 22 bp, Artificial Sequence
  Probe
tcgaatcctgccgactacggca

SEQ ID NO: 50691 - DNA, 22 bp, Artificial Sequence
  Probe
tcgaatcctgccgactacgtca

SEQ ID NO: 50692 - DNA, 33 bp, Artificial Sequence; identical to SEQ ID NO: 7958
  Probe

SEQ ID NO: 50693 - DNA, 38 bp, Artificial Sequence; identical to SEQ ID NO: 24034
  Probe

SEQ ID NO: 50694 - DNA, 21 bp, Artificial Sequence
  Probe
tcgactcccggtatgggaaca

SEQ ID NO: 50695 - DNA, 22 bp, Artificial Sequence
  Probe
tcgactcccggtatgggaacaa

SEQ ID NO: 50696 - DNA, 21 bp, Artificial Sequence
  Probe
tcgactcccggtatgggaacg

SEQ ID NO: 50697 - DNA, 19 bp, Artificial Sequence
  Probe
tcgactcccggtgtgggaa

SEQ ID NO: 50698 - DNA, 21 bp, Artificial Sequence
  Probe
tcgactcccggtgtgggaacg

SEQ ID NO: 50699 - DNA, 22 bp, Artificial Sequence
  Probe
tcgactcccggtgtgggaacgc

SEQ ID NO: 50700 - DNA, 17 bp, Artificial Sequence
  Probe
tcgagcccacccaggga

SEQ ID NO: 50701 - DNA, 19 bp, Artificial Sequence
  Probe
tcgagcccacccagggacg

SEQ ID NO: 50702 - DNA, 20 bp, Artificial Sequence
  Probe
tcgagcccacccagggacgc

SEQ ID NO: 50703 - DNA, 21 bp, Artificial Sequence
  Probe
tcgagcccacccagggacgcc

SEQ ID NO: 50704 - DNA, 22 bp, Artificial Sequence
  Probe
tcgagcccacccagggacgcct

SEQ ID NO: 50705 - DNA, 20 bp, Artificial Sequence
  Probe
tcgagccccagtggaaccac

SEQ ID NO: 50706 - DNA, 21 bp, Artificial Sequence
  Probe
tcgagccccagtggaaccacg

SEQ ID NO: 50707 - DNA, 19 bp, Artificial Sequence
  Probe
tcgagcctcacctggagca

SEQ ID NO: 50708 - DNA, 22 bp, Artificial Sequence
  Probe
tcgagtcccacctggggtgtcg

SEQ ID NO: 50709 - DNA, 22 bp, Artificial Sequence
  Probe
tcgagtcccatctgggtcgcgt

SEQ ID NO: 50710 - DNA, 22 bp, Artificial Sequence
  Probe
tcgagtcccttcgtggtcgttg

SEQ ID NO: 50711 - DNA, 21 bp, Artificial Sequence
  Probe
tcgatccccggcatctccatt

SEQ ID NO: 50712 - DNA, 22 bp, Artificial Sequence
  Probe
tcgatccccggcatctccattg

SEQ ID NO: 50713 - DNA, 22 bp, Artificial Sequence
  Probe
tcgatccccgtacgggccacga

SEQ ID NO: 50714 - DNA, 22 bp, Artificial Sequence
  Probe
tcgatccccgtacgggccactg

SEQ ID NO: 50715 - DNA, 22 bp, Artificial Sequence
  Probe
tcgatcccgggcggaaacaggt

SEQ ID NO: 50716 - DNA, 22 bp, Artificial Sequence
  Probe
tcgatcctcacacggggcacaa

SEQ ID NO: 50717 - DNA, 21 bp, Artificial Sequence
  Probe
tcgatgcccgcatcctccact

SEQ ID NO: 50718 - DNA, 20 bp, Artificial Sequence
  Probe
tcgattccccgacggggaga

SEQ ID NO: 50719 - DNA, 21 bp, Artificial Sequence
  Probe
tcgattccccgacggggagac

SEQ ID NO: 50720 - DNA, 20 bp, Artificial Sequence
  Probe
tcgattccccgacggggagg

SEQ ID NO: 50721 - DNA, 21 bp, Artificial Sequence
  Probe
tcgattccccgacggggaggc

SEQ ID NO: 50722 - DNA, 22 bp, Artificial Sequence
  Probe
tcgattccccgacggggaggca

SEQ ID NO: 50723 - DNA, 19 bp, Artificial Sequence
  Probe
tcgattcccggccaacgca

SEQ ID NO: 50724 - DNA, 20 bp, Artificial Sequence
  Probe
tcgattcccggccaacgcaa

SEQ ID NO: 50725 - DNA, 22 bp, Artificial Sequence
  Probe
tcgattcccggccaacgcaagt

SEQ ID NO: 50726 - DNA, 20 bp, Artificial Sequence
  Probe
tcgattcccggccaacgcag

SEQ ID NO: 50727 - DNA, 21 bp, Artificial Sequence
  Probe
tcgattcccggccaacgcagc

SEQ ID NO: 50728 - DNA, 22 bp, Artificial Sequence
  Probe
tcgattcccggccaacgcagtg

SEQ ID NO: 50729 - DNA, 20 bp, Artificial Sequence
  Probe
tcgattcccggccaacgcat

SEQ ID NO: 50730 - DNA, 19 bp, Artificial Sequence
  Probe
tcgattcccggccaatgca

SEQ ID NO: 50731 - DNA, 22 bp, Artificial Sequence
  Probe
tcgattcccggccaatgcacga

SEQ ID NO: 50732 - DNA, 22 bp, Artificial Sequence
  Probe
tcgattcccggccaatgcagca

SEQ ID NO: 50733 - DNA, 22 bp, Artificial Sequence
  Probe
tcgattcccggcccatgcagca

SEQ ID NO: 50734 - DNA, 19 bp, Artificial Sequence
  Probe
tcgattcccgggcggcgca

SEQ ID NO: 50735 - DNA, 22 bp, Artificial Sequence
  Probe
tcgattcccgggcggcgcactt

SEQ ID NO: 50736 - DNA, 21 bp, Artificial Sequence
  Probe
tcgattcccggtcagggaaca

SEQ ID NO: 50737 - DNA, 22 bp, Artificial Sequence
  Probe
tcgattcccggtcagggaacaa

SEQ ID NO: 50738 - DNA, 22 bp, Artificial Sequence
  Probe
tcgattcccggtcatggaacca

SEQ ID NO: 50739 - DNA, 22 bp, Artificial Sequence
  Probe
tcgattcctggtcagggaacca

SEQ ID NO: 50740 - DNA, 27 bp, Artificial Sequence
  Probe
tcgcataaaacttaaaactttacagtc

SEQ ID NO: 50741 - DNA, 31 bp, Artificial Sequence
  Probe
tcgcataaaacttaaaactttacagtcagag

SEQ ID NO: 50742 - DNA, 35 bp, Artificial Sequence; identical to SEQ ID NO: 7987
  Probe

SEQ ID NO: 50743 - DNA, 36 bp, Artificial Sequence; identical to SEQ ID NO: 34671
  Probe

SEQ ID NO: 50744 - DNA, 50 bp, Artificial Sequence; identical to SEQ ID NO: 7991
  Probe

SEQ ID NO: 50745 - DNA, 26 bp, Artificial Sequence
  Probe
tcgcctgccacgcgggaggcccgggt

SEQ ID NO: 50746 - DNA, 23 bp, Artificial Sequence
  Probe
tcgccttaattttaataatcaac

SEQ ID NO: 50747 - DNA, 30 bp, Artificial Sequence
  Probe
tcgcgggttcgatccccgtacgggccactg

SEQ ID NO: 50748 - DNA, 44 bp, Artificial Sequence
  Probe
tcggctgttaaccgaaaggttggtggttcgagcccacccaggga

SEQ ID NO: 50749 - DNA, 46 bp, Artificial Sequence
  Probe
tcggctgttaaccgaaaggttggtggttcgagcccacccagggacg

SEQ ID NO: 50750 - DNA, 50 bp, Artificial Sequence
  Probe
tcggctgttaaccgaaaggttggtggttcgagcccacccagggacgcctc

SEQ ID NO: 50751 - DNA, 50 bp, Artificial Sequence
  Probe
tcggctgttaaccgaaaggttggtggttcgagcccacccagggacgcgtg

SEQ ID NO: 50752 - DNA, 29 bp, Artificial Sequence
  Probe
tcgtggttgtagtccgtgcgagaataatg

SEQ ID NO: 50753 - DNA, 34 bp, Artificial Sequence; identical to SEQ ID NO: 24121
  Probe

SEQ ID NO: 50754 - DNA, 35 bp, Artificial Sequence; identical to SEQ ID NO: 7996
  Probe

SEQ ID NO: 50755 - DNA, 38 bp, Artificial Sequence
  Probe
tctaaaggtccctggttcgatcccgggtttcggcactt

SEQ ID NO: 50756 - DNA, 21 bp, Artificial Sequence
  Probe
tctaacaacatggctttctca

SEQ ID NO: 50757 - DNA, 23 bp, Artificial Sequence
  Probe
tctaacaacatggctttctcaac

SEQ ID NO: 50758 - DNA, 24 bp, Artificial Sequence
  Probe
tctaacaacatggctttctcaact

SEQ ID NO: 50759 - DNA, 21 bp, Artificial Sequence
  Probe
tctagcggttaggattcctgg

SEQ ID NO: 50760 - DNA, 20 bp, Artificial Sequence
  Probe
tctaggggtatgattctcgc

SEQ ID NO: 50761 - DNA, 26 bp, Artificial Sequence
  Probe
tctaggttcgactcctggctggctcg

SEQ ID NO: 50762 - DNA, 26 bp, Artificial Sequence
  Probe
tctcagggatgggttcgattctcata

SEQ ID NO: 50763 - DNA, 29 bp, Artificial Sequence
  Probe
tctcagggatgggttcgattctcatagtc

SEQ ID NO: 50764 - DNA, 31 bp, Artificial Sequence; identical to SEQ ID NO: 24132
  Probe

SEQ ID NO: 50765 - DNA, 33 bp, Artificial Sequence; identical to SEQ ID NO: 1726
  Probe

SEQ ID NO: 50766 - DNA, 36 bp, Artificial Sequence; identical to SEQ ID NO: 8002
  Probe

SEQ ID NO: 50767 - DNA, 33 bp, Artificial Sequence; identical to SEQ ID NO: 8003
  Probe

SEQ ID NO: 50768 - DNA, 35 bp, Artificial Sequence
  Probe
tctcagggtcgtgggttcgagccccacgttgggcg

SEQ ID NO: 50769 - DNA, 24 bp, Artificial Sequence
  Probe
tctcataatctgaaggtcctgagt

SEQ ID NO: 50770 - DNA, 46 bp, Artificial Sequence; identical to SEQ ID NO: 41985
  Probe

SEQ ID NO: 50771 - DNA, 37 bp, Artificial Sequence
  Probe
tctccaatggaggcgtgggttcgaatcccacttctga

SEQ ID NO: 50772 - DNA, 31 bp, Artificial Sequence; identical to SEQ ID NO: 24138
  Probe

SEQ ID NO: 50773 - DNA, 38 bp, Artificial Sequence; identical to SEQ ID NO: 24140
  Probe

SEQ ID NO: 50774 - DNA, 35 bp, Artificial Sequence; identical to SEQ ID NO: 34817
  Probe

SEQ ID NO: 50775 - DNA, 35 bp, Artificial Sequence; identical to SEQ ID NO: 24143
  Probe

SEQ ID NO: 50776 - DNA, 38 bp, Artificial Sequence; identical to SEQ ID NO: 8005
  Probe

SEQ ID NO: 50777 - DNA, 37 bp, Artificial Sequence; identical to SEQ ID NO: 8010
  Probe

SEQ ID NO: 50778 - DNA, 33 bp, Artificial Sequence; identical to SEQ ID NO: 8013
  Probe

SEQ ID NO: 50779 - DNA, 35 bp, Artificial Sequence; identical to SEQ ID NO: 34835
  Probe

SEQ ID NO: 50780 - DNA, 50 bp, Artificial Sequence; identical to SEQ ID NO: 8014
  Probe

SEQ ID NO: 50781 - DNA, 45 bp, Artificial Sequence
  Probe
tcttaggccccaaaaattttggtgcaactccaaataaaagtaata

SEQ ID NO: 50782 - DNA, 37 bp, Artificial Sequence; identical to SEQ ID NO: 8017
  Probe

SEQ ID NO: 50783 - DNA, 25 bp, Artificial Sequence
  Probe
tgaaaacctttttccaaggacaaat

SEQ ID NO: 50784 - DNA, 40 bp, Artificial Sequence; identical to SEQ ID NO: 24167
  Probe

SEQ ID NO: 50785 - DNA, 41 bp, Artificial Sequence; identical to SEQ ID NO: 8021
  Probe

SEQ ID NO: 50786 - DNA, 36 bp, Artificial Sequence; identical to SEQ ID NO: 24172
  Probe

SEQ ID NO: 50787 - DNA, 33 bp, Artificial Sequence; identical to SEQ ID NO: 8024
  Probe

SEQ ID NO: 50788 - DNA, 36 bp, Artificial Sequence; identical to SEQ ID NO: 8025
  Probe

SEQ ID NO: 50789 - DNA, 21 bp, Artificial Sequence
  Probe
tgaatccagcgatccgagttc

SEQ ID NO: 50790 - DNA, 19 bp, Artificial Sequence
  Probe
tgaatctgacaacagaggc

SEQ ID NO: 50791 - DNA, 27 bp, Artificial Sequence
  Probe
tgaatctgacaacagaggcttacgacc

SEQ ID NO: 50792 - DNA, 28 bp, Artificial Sequence
  Probe
tgaatctgacaacagaggcttacgaccc

SEQ ID NO: 50793 - DNA, 29 bp, Artificial Sequence
  Probe
tgaatctgacaacagaggcttacgacccc

SEQ ID NO: 50794 - DNA, 30 bp, Artificial Sequence; identical to SEQ ID NO: 1734
  Probe

SEQ ID NO: 50795 - DNA, 31 bp, Artificial Sequence; identical to SEQ ID NO: 1735
  Probe

SEQ ID NO: 50796 - DNA, 33 bp, Artificial Sequence; identical to SEQ ID NO: 1737
  Probe

SEQ ID NO: 50797 - DNA, 35 bp, Artificial Sequence; identical to SEQ ID NO: 1739
  Probe

SEQ ID NO: 50798 - DNA, 36 bp, Artificial Sequence; identical to SEQ ID NO: 1740
  Probe

SEQ ID NO: 50799 - DNA, 39 bp, Artificial Sequence; identical to SEQ ID NO: 8042
  Probe

SEQ ID NO: 50800 - DNA, 40 bp, Artificial Sequence; identical to SEQ ID NO: 8043
  Probe

SEQ ID NO: 50801 - DNA, 41 bp, Artificial Sequence; identical to SEQ ID NO: 8044
  Probe

SEQ ID NO: 50802 - DNA, 46 bp, Artificial Sequence; identical to SEQ ID NO: 8048
  Probe

SEQ ID NO: 50803 - DNA, 50 bp, Artificial Sequence
  Probe
tgaattgcaaattcgaagaagcagcttcaaacctgccggggcttctcccg

SEQ ID NO: 50804 - DNA, 23 bp, Artificial Sequence
  Probe
tgacaacagaggcttacgacccc

SEQ ID NO: 50805 - DNA, 33 bp, Artificial Sequence; identical to SEQ ID NO: 8057
  Probe

SEQ ID NO: 50806 - DNA, 34 bp, Artificial Sequence; identical to SEQ ID NO: 8058
  Probe

SEQ ID NO: 50807 - DNA, 35 bp, Artificial Sequence; identical to SEQ ID NO: 8059
  Probe

SEQ ID NO: 50808 - DNA, 29 bp, Artificial Sequence
  Probe
tgacccgggttcgattcccggccaacgca

SEQ ID NO: 50809 - DNA, 32 bp, Artificial Sequence; identical to SEQ ID NO: 8061
  Probe

SEQ ID NO: 50810 - DNA, 32 bp, Artificial Sequence; identical to SEQ ID NO: 8062
  Probe

SEQ ID NO: 50811 - DNA, 26 bp, Artificial Sequence
  Probe
tgaggccccgggttcgatccccggca

SEQ ID NO: 50812 - DNA, 35 bp, Artificial Sequence; identical to SEQ ID NO: 24211
  Probe

SEQ ID NO: 50813 - DNA, 31 bp, Artificial Sequence; identical to SEQ ID NO: 8065
  Probe

SEQ ID NO: 50814 - DNA, 33 bp, Artificial Sequence; identical to SEQ ID NO: 8066
  Probe

SEQ ID NO: 50815 - DNA, 24 bp, Artificial Sequence
  Probe
tgagggttcgagtcccttcgtggt

SEQ ID NO: 50816 - DNA, 25 bp, Artificial Sequence
  Probe
tgagggttcgagtcccttcgtggtc

SEQ ID NO: 50817 - DNA, 27 bp, Artificial Sequence
  Probe
tgagggttcgagtcccttcgtggtcgg

SEQ ID NO: 50818 - DNA, 27 bp, Artificial Sequence
  Probe
tgagggttcgagtcccttcgtggtcgt

SEQ ID NO: 50819 - DNA, 27 bp, Artificial Sequence
  Probe
tgagttcgagcctcacctggagcattg

SEQ ID NO: 50820 - DNA, 26 bp, Artificial Sequence
  Probe
tgagttcgatcctcacacggggcaca

SEQ ID NO: 50821 - DNA, 27 bp, Artificial Sequence
  Probe
tgagttcgatcctcacacggggcacaa

SEQ ID NO: 50822 - DNA, 22 bp, Artificial Sequence
  Probe
tgataatcatatttaccaaatg

SEQ ID NO: 50823 - DNA, 33 bp, Artificial Sequence
  Probe
tgatagagtaaataataggagcttaaaccccct

SEQ ID NO: 50824 - DNA, 43 bp, Artificial Sequence; identical to SEQ ID NO: 8070
  Probe

SEQ ID NO: 50825 - DNA, 44 bp, Artificial Sequence; identical to SEQ ID NO: 8071
  Probe

SEQ ID NO: 50826 - DNA, 25 bp, Artificial Sequence
  Probe
tgatgcagagtggggttttgcagtc

SEQ ID NO: 50827 - DNA, 32 bp, Artificial Sequence; identical to SEQ ID NO: 8074
  Probe

SEQ ID NO: 50828 - DNA, 28 bp, Artificial Sequence
  Probe
tgcaaattcgaagaagcagcttcaaacc

SEQ ID NO: 50829 - DNA, 35 bp, Artificial Sequence
  Probe
tgcaaattcgaagaagcagcttcaaacctgccggg

SEQ ID NO: 50830 - DNA, 36 bp, Artificial Sequence; identical to SEQ ID NO: 8078
  Probe

SEQ ID NO: 50831 - DNA, 39 bp, Artificial Sequence; identical to SEQ ID NO: 8079
  Probe

SEQ ID NO: 50832 - DNA, 40 bp, Artificial Sequence; identical to SEQ ID NO: 8080
  Probe

SEQ ID NO: 50833 - DNA, 41 bp, Artificial Sequence; identical to SEQ ID NO: 8081
  Probe

SEQ ID NO: 50834 - DNA, 42 bp, Artificial Sequence; identical to SEQ ID NO: 8082
  Probe

SEQ ID NO: 50835 - DNA, 20 bp, Artificial Sequence
  Probe
tgcaactccaaataaaagta

SEQ ID NO: 50836 - DNA, 23 bp, Artificial Sequence
  Probe
tgcacactactataaccacccta

SEQ ID NO: 50837 - DNA, 39 bp, Artificial Sequence; identical to SEQ ID NO: 8084
  Probe

SEQ ID NO: 50838 - DNA, 39 bp, Artificial Sequence; identical to SEQ ID NO: 24242
  Probe

SEQ ID NO: 50839 - DNA, 39 bp, Artificial Sequence; identical to SEQ ID NO: 8085
  Probe

SEQ ID NO: 50840 - DNA, 25 bp, Artificial Sequence
  Probe
tgcacgcgtgggttcgaatcccatc

SEQ ID NO: 50841 - DNA, 29 bp, Artificial Sequence
  Probe
tgcacgcgtgggttcgaatcccatcctcg

SEQ ID NO: 50842 - DNA, 30 bp, Artificial Sequence; identical to SEQ ID NO: 24246
  Probe

SEQ ID NO: 50843 - DNA, 32 bp, Artificial Sequence
  Probe
tgcacgcgtgggttcgaatcccatcctcgtcg

SEQ ID NO: 50844 - DNA, 29 bp, Artificial Sequence
  Probe
tgcagagtggggttttgcagtccttagct

SEQ ID NO: 50845 - DNA, 26 bp, Artificial Sequence
  Probe
tgcaggttcgagtcctgccgcggtcg

SEQ ID NO: 50846 - DNA, 39 bp, Artificial Sequence; identical to SEQ ID NO: 8088
  Probe

SEQ ID NO: 50847 - DNA, 32 bp, Artificial Sequence
  Probe
tgcatgggtggttcagtggtagaattctcgcc

SEQ ID NO: 50848 - DNA, 33 bp, Artificial Sequence; identical to SEQ ID NO: 8089
  Probe

SEQ ID NO: 50849 - DNA, 17 bp, Artificial Sequence
  Probe
tgccacgcgggaggccc

SEQ ID NO: 50850 - DNA, 43 bp, Artificial Sequence; identical to SEQ ID NO: 24254
  Probe

SEQ ID NO: 50851 - DNA, 43 bp, Artificial Sequence; identical to SEQ ID NO: 24255
  Probe

SEQ ID NO: 50852 - DNA, 16 bp, Artificial Sequence
  Probe
tgccatgttaacgttt

SEQ ID NO: 50853 - DNA, 27 bp, Artificial Sequence
  Probe
tgccccaactaaatactaccgtatggc

SEQ ID NO: 50854 - DNA, 16 bp, Artificial Sequence
  Probe
tgcccccatgtctaac

SEQ ID NO: 50855 - DNA, 17 bp, Artificial Sequence
  Probe
tgcccccatgtctaaca

SEQ ID NO: 50856 - DNA, 18 bp, Artificial Sequence
  Probe
tgcccccatgtctaacaa

SEQ ID NO: 50857 - DNA, 19 bp, Artificial Sequence
  Probe
tgcccccatgtctaacaac

SEQ ID NO: 50858 - DNA, 20 bp, Artificial Sequence
  Probe
tgcccccatgtctaacaaca

SEQ ID NO: 50859 - DNA, 21 bp, Artificial Sequence
  Probe
tgcccccatgtctaacaacat

SEQ ID NO: 50860 - DNA, 23 bp, Artificial Sequence
  Probe
tgcccccatgtctaacaacatgg

SEQ ID NO: 50861 - DNA, 24 bp, Artificial Sequence
  Probe
tgcccccatgtctaacaacatggc

SEQ ID NO: 50862 - DNA, 25 bp, Artificial Sequence
  Probe
tgcccccatgtctaacaacatggct

SEQ ID NO: 50863 - DNA, 26 bp, Artificial Sequence
  Probe
tgcccccatgtctaacaacatggctt

SEQ ID NO: 50864 - DNA, 27 bp, Artificial Sequence
  Probe
tgcccccatgtctaacaacatggcttt

SEQ ID NO: 50865 - DNA, 28 bp, Artificial Sequence
  Probe
tgcccccatgtctaacaacatggctttc

SEQ ID NO: 50866 - DNA, 29 bp, Artificial Sequence
  Probe
tgcccccatgtctaacaacatggctttct

SEQ ID NO: 50867 - DNA, 30 bp, Artificial Sequence; identical to SEQ ID NO: 8103
  Probe

SEQ ID NO: 50868 - DNA, 31 bp, Artificial Sequence; identical to SEQ ID NO: 8104
  Probe

SEQ ID NO: 50869 - DNA, 32 bp, Artificial Sequence; identical to SEQ ID NO: 8105
  Probe

SEQ ID NO: 50870 - DNA, 33 bp, Artificial Sequence; identical to SEQ ID NO: 8106
  Probe

SEQ ID NO: 50871 - DNA, 34 bp, Artificial Sequence; identical to SEQ ID NO: 8107
  Probe

SEQ ID NO: 50872 - DNA, 35 bp, Artificial Sequence; identical to SEQ ID NO: 24277
  Probe

SEQ ID NO: 50873 - DNA, 38 bp, Artificial Sequence; identical to SEQ ID NO: 24278
  Probe

SEQ ID NO: 50874 - DNA, 28 bp, Artificial Sequence
  Probe
tgcccctcatttacataaatattatact

SEQ ID NO: 50875 - DNA, 29 bp, Artificial Sequence
  Probe
tgcccctcatttacataaatattatacta

SEQ ID NO: 50876 - DNA, 17 bp, Artificial Sequence
  Probe
tgcccgcatcctccact

SEQ ID NO: 50877 - DNA, 18 bp, Artificial Sequence
  Probe
tgcccgcatcctccactc

SEQ ID NO: 50878 - DNA, 34 bp, Artificial Sequence; identical to SEQ ID NO: 8110
  Probe

SEQ ID NO: 50879 - DNA, 35 bp, Artificial Sequence
  Probe
tgccgaggttgtgagttcgagcctcacctggagca

SEQ ID NO: 50880 - DNA, 33 bp, Artificial Sequence
  Probe
tgccgaggttgtgagttcgatcctcacctggag

SEQ ID NO: 50881 - DNA, 16 bp, Artificial Sequence
  Probe
tgccgtgatcgtatag

SEQ ID NO: 50882 - DNA, 17 bp, Artificial Sequence
  Probe
tgccgtgatcgtatagt

SEQ ID NO: 50883 - DNA, 18 bp, Artificial Sequence
  Probe
tgccgtgatcgtatagtg

SEQ ID NO: 50884 - DNA, 19 bp, Artificial Sequence
  Probe
tgccgtgatcgtatagtgg

SEQ ID NO: 50885 - DNA, 20 bp, Artificial Sequence
  Probe
tgccgtgatcgtatagtggt

SEQ ID NO: 50886 - DNA, 21 bp, Artificial Sequence
  Probe
tgccgtgatcgtatagtggtt

SEQ ID NO: 50887 - DNA, 22 bp, Artificial Sequence
  Probe
tgccgtgatcgtatagtggtta

SEQ ID NO: 50888 - DNA, 23 bp, Artificial Sequence
  Probe
tgccgtgatcgtatagtggttag

SEQ ID NO: 50889 - DNA, 24 bp, Artificial Sequence
  Probe
tgccgtgatcgtatagtggttagt

SEQ ID NO: 50890 - DNA, 25 bp, Artificial Sequence
  Probe
tgccgtgatcgtatagtggttagta

SEQ ID NO: 50891 - DNA, 27 bp, Artificial Sequence
  Probe
tgccgtgatcgtatagtggttagtact

SEQ ID NO: 50892 - DNA, 28 bp, Artificial Sequence
  Probe
tgccgtgatcgtatagtggttagtactc

SEQ ID NO: 50893 - DNA, 31 bp, Artificial Sequence; identical to SEQ ID NO: 8115
  Probe

SEQ ID NO: 50894 - DNA, 32 bp, Artificial Sequence; identical to SEQ ID NO: 8116
  Probe

SEQ ID NO: 50895 - DNA, 33 bp, Artificial Sequence; identical to SEQ ID NO: 1754
  Probe

SEQ ID NO: 50896 - DNA, 34 bp, Artificial Sequence; identical to SEQ ID NO: 8117
  Probe

SEQ ID NO: 50897 - DNA, 35 bp, Artificial Sequence; identical to SEQ ID NO: 1755
  Probe

SEQ ID NO: 50898 - DNA, 36 bp, Artificial Sequence; identical to SEQ ID NO: 1756
  Probe

SEQ ID NO: 50899 - DNA, 37 bp, Artificial Sequence; identical to SEQ ID NO: 1757
  Probe

SEQ ID NO: 50900 - DNA, 39 bp, Artificial Sequence
  Probe
tgccgtgatcgtatagtggttagtactctgcgttgtggc

SEQ ID NO: 50901 - DNA, 40 bp, Artificial Sequence; identical to SEQ ID NO: 24303
  Probe

SEQ ID NO: 50902 - DNA, 42 bp, Artificial Sequence
  Probe
tgccgtgatcgtatagtggttagtactctgcgttgtggccgc

SEQ ID NO: 50903 - DNA, 50 bp, Artificial Sequence; identical to SEQ ID NO: 35021
  Probe

SEQ ID NO: 50904 - DNA, 21 bp, Artificial Sequence
  Probe
tgcgaaactactttcttgatt

SEQ ID NO: 50905 - DNA, 23 bp, Artificial Sequence
  Probe
tgcgaaactactttcttgattca

SEQ ID NO: 50906 - DNA, 33 bp, Artificial Sequence; identical to SEQ ID NO: 14385
  Probe

SEQ ID NO: 50907 - DNA, 36 bp, Artificial Sequence; identical to SEQ ID NO: 24311
  Probe

SEQ ID NO: 50908 - DNA, 37 bp, Artificial Sequence; identical to SEQ ID NO: 14386
  Probe

SEQ ID NO: 50909 - DNA, 39 bp, Artificial Sequence; identical to SEQ ID NO: 8121
  Probe

SEQ ID NO: 50910 - DNA, 29 bp, Artificial Sequence
  Probe
tgcgtgttcaaatcacgtcggggtcaaca

SEQ ID NO: 50911 - DNA, 26 bp, Artificial Sequence
  Probe
tgcgtgttcaagtcacgtcggggtca

SEQ ID NO: 50912 - DNA, 42 bp, Artificial Sequence; identical to SEQ ID NO: 24314
  Probe

SEQ ID NO: 50913 - DNA, 36 bp, Artificial Sequence; identical to SEQ ID NO: 8127
  Probe

SEQ ID NO: 50914 - DNA, 42 bp, Artificial Sequence; identical to SEQ ID NO: 24325
  Probe

SEQ ID NO: 50915 - DNA, 43 bp, Artificial Sequence; identical to SEQ ID NO: 8133
  Probe

SEQ ID NO: 50916 - DNA, 44 bp, Artificial Sequence; identical to SEQ ID NO: 8134
  Probe

SEQ ID NO: 50917 - DNA, 50 bp, Artificial Sequence
  Probe
tgctaataacgccaaggtcgcgggttcgatccccgtacgggccactggat

SEQ ID NO: 50918 - DNA, 50 bp, Artificial Sequence; identical to SEQ ID NO: 42078
  Probe

SEQ ID NO: 50919 - DNA, 17 bp, Artificial Sequence
  Probe
tgctaatccattgtgct

SEQ ID NO: 50920 - DNA, 17 bp, Artificial Sequence
  Probe
tgctaatggtggagtta

SEQ ID NO: 50921 - DNA, 21 bp, Artificial Sequence
  Probe
tgctaatggtggagttaaaga

SEQ ID NO: 50922 - DNA, 33 bp, Artificial Sequence; identical to SEQ ID NO: 1758
  Probe

SEQ ID NO: 50923 - DNA, 36 bp, Artificial Sequence; identical to SEQ ID NO: 8139
  Probe

SEQ ID NO: 50924 - DNA, 37 bp, Artificial Sequence
  Probe
tgctaatggtggagttaaagactttttctctgatttg

SEQ ID NO: 50925 - DNA, 38 bp, Artificial Sequence; identical to SEQ ID NO: 8140
  Probe

SEQ ID NO: 50926 - DNA, 39 bp, Artificial Sequence; identical to SEQ ID NO: 8141
  Probe

SEQ ID NO: 50927 - DNA, 40 bp, Artificial Sequence; identical to SEQ ID NO: 8142
  Probe

SEQ ID NO: 50928 - DNA, 41 bp, Artificial Sequence; identical to SEQ ID NO: 8143
  Probe

SEQ ID NO: 50929 - DNA, 42 bp, Artificial Sequence; identical to SEQ ID NO: 8144
  Probe

SEQ ID NO: 50930 - DNA, 43 bp, Artificial Sequence; identical to SEQ ID NO: 8145
  Probe

SEQ ID NO: 50931 - DNA, 44 bp, Artificial Sequence; identical to SEQ ID NO: 8146
  Probe

SEQ ID NO: 50932 - DNA, 45 bp, Artificial Sequence; identical to SEQ ID NO: 8147
  Probe

SEQ ID NO: 50933 - DNA, 46 bp, Artificial Sequence; identical to SEQ ID NO: 8148
  Probe

SEQ ID NO: 50934 - DNA, 25 bp, Artificial Sequence
  Probe
tggagttaaagactttttctctgat

SEQ ID NO: 50935 - DNA, 27 bp, Artificial Sequence
  Probe
tggagttaaagactttttctctgattt

SEQ ID NO: 50936 - DNA, 26 bp, Artificial Sequence
  Probe
tggatcgaaaccatcctctgctaggt

SEQ ID NO: 50937 - DNA, 21 bp, Artificial Sequence
  Probe
tggccaacctcctactcctca

SEQ ID NO: 50938 - DNA, 27 bp, Artificial Sequence
  Probe
tggcccgggttcgactcccggtatggg

SEQ ID NO: 50939 - DNA, 28 bp, Artificial Sequence
  Probe
tggcccgggttcgactcccggtatggga

SEQ ID NO: 50940 - DNA, 29 bp, Artificial Sequence
  Probe
tggcccgggttcgactcccggtatgggaa

SEQ ID NO: 50941 - DNA, 30 bp, Artificial Sequence; identical to SEQ ID NO: 24347
  Probe

SEQ ID NO: 50942 - DNA, 32 bp, Artificial Sequence; identical to SEQ ID NO: 8153
  Probe

SEQ ID NO: 50943 - DNA, 23 bp, Artificial Sequence
  Probe
tggccgcagcaacctcggttcga

SEQ ID NO: 50944 - DNA, 49 bp, Artificial Sequence
  Probe
tgggcccataacccagaggtcgatggatcgaaaccatcctctgctaggt

SEQ ID NO: 50945 - DNA, 50 bp, Artificial Sequence; identical to SEQ ID NO: 8156
  Probe

SEQ ID NO: 50946 - DNA, 48 bp, Artificial Sequence
  Probe
tgggcccataacccagaggtcgatggatcgaaaccatcctctgctatc

SEQ ID NO: 50947 - DNA, 29 bp, Artificial Sequence
  Probe
tggggattgtgggttcgagtcccatctgg

SEQ ID NO: 50948 - DNA, 33 bp, Artificial Sequence
  Probe
tgggggtatagctcagtggtagagcatttgact

SEQ ID NO: 50949 - DNA, 40 bp, Artificial Sequence; identical to SEQ ID NO: 8164
  Probe

SEQ ID NO: 50950 - DNA, 20 bp, Artificial Sequence
  Probe
tggtagaattctcgcctgcc

SEQ ID NO: 50951 - DNA, 33 bp, Artificial Sequence; identical to SEQ ID NO: 1768
  Probe

SEQ ID NO: 50952 - DNA, 28 bp, Artificial Sequence
  Probe
tggtatatagtttaaacaaaacgaatga

SEQ ID NO: 50953 - DNA, 36 bp, Artificial Sequence; identical to SEQ ID NO: 1771
  Probe

SEQ ID NO: 50954 - DNA, 37 bp, Artificial Sequence; identical to SEQ ID NO: 1772
  Probe

SEQ ID NO: 50955 - DNA, 50 bp, Artificial Sequence; identical to SEQ ID NO: 1773
  Probe

SEQ ID NO: 50956 - DNA, 22 bp, Artificial Sequence
  Probe
tggtcctagcctttctattagc

SEQ ID NO: 50957 - DNA, 22 bp, Artificial Sequence
  Probe
tggtcgtggttgtagtccgtgc

SEQ ID NO: 50958 - DNA, 28 bp, Artificial Sequence
  Probe
tggtcgtggttgtagtccgtgcgagaat

SEQ ID NO: 50959 - DNA, 29 bp, Artificial Sequence
  Probe
tggtcgtggttgtagtccgtgcgagaata

SEQ ID NO: 50960 - DNA, 32 bp, Artificial Sequence; identical to SEQ ID NO: 8180
  Probe

SEQ ID NO: 50961 - DNA, 16 bp, Artificial Sequence
  Probe
tggtgagtatccccgc

SEQ ID NO: 50962 - DNA, 22 bp, Artificial Sequence
  Probe
tggtgagtatccccgcctgtca

SEQ ID NO: 50963 - DNA, 35 bp, Artificial Sequence; identical to SEQ ID NO: 14415
  Probe

SEQ ID NO: 50964 - DNA, 50 bp, Artificial Sequence
  Probe
tggtgagtatccccgcctgtcacgcgggagaccggggttcgattccccga

SEQ ID NO: 50965 - DNA, 29 bp, Artificial Sequence
  Probe
tggtggagttaaagactttttctctgatt

SEQ ID NO: 50966 - DNA, 30 bp, Artificial Sequence; identical to SEQ ID NO: 24420
  Probe

SEQ ID NO: 50967 - DNA, 26 bp, Artificial Sequence
  Probe
tggtggttcgagcccacccagggacg

SEQ ID NO: 50968 - DNA, 29 bp, Artificial Sequence
  Probe
tggtggttcgagcccacccagggacgcct

SEQ ID NO: 50969 - DNA, 23 bp, Artificial Sequence
  Probe
tggtgtagtggtatcatgcaaga

SEQ ID NO: 50970 - DNA, 41 bp, Artificial Sequence; identical to SEQ ID NO: 14425
  Probe

SEQ ID NO: 50971 - DNA, 18 bp, Artificial Sequence
  Probe
tggttaggattcggcgct

SEQ ID NO: 50972 - DNA, 19 bp, Artificial Sequence
  Probe
tggttaggattcggcgctc

SEQ ID NO: 50973 - DNA, 22 bp, Artificial Sequence
  Probe
tggttaggattcggcgctctca

SEQ ID NO: 50974 - DNA, 34 bp, Artificial Sequence; identical to SEQ ID NO: 14437
  Probe

SEQ ID NO: 50975 - DNA, 16 bp, Artificial Sequence
  Probe
tggttagtactctgcg

SEQ ID NO: 50976 - DNA, 26 bp, Artificial Sequence
  Probe
tggttcagtggtagaattctcgcctg

SEQ ID NO: 50977 - DNA, 21 bp, Artificial Sequence
  Probe
tggttcgagcccacccaggga

SEQ ID NO: 50978 - DNA, 26 bp, Artificial Sequence
  Probe
tggttcgagcccacccagggacgcct

SEQ ID NO: 50979 - DNA, 23 bp, Artificial Sequence
  Probe
tggttcgatcccgggtttcggca

SEQ ID NO: 50980 - DNA, 17 bp, Artificial Sequence
  Probe
tggttgtagtccgtgcg

SEQ ID NO: 50981 - DNA, 21 bp, Artificial Sequence
  Probe
tggttgtagtccgtgcgagaa

SEQ ID NO: 50982 - DNA, 26 bp, Artificial Sequence
  Probe
tggttgtagtccgtgcgagaataatg

SEQ ID NO: 50983 - DNA, 37 bp, Artificial Sequence
  Probe
tggtttttcatatcattggtcgtggttgtagtccgtg

SEQ ID NO: 50984 - DNA, 31 bp, Artificial Sequence
  Probe
tgtaaaccggagatgaaaacctttttccaag

SEQ ID NO: 50985 - DNA, 37 bp, Artificial Sequence; identical to SEQ ID NO: 8221
  Probe

SEQ ID NO: 50986 - DNA, 38 bp, Artificial Sequence; identical to SEQ ID NO: 8222
  Probe

SEQ ID NO: 50987 - DNA, 43 bp, Artificial Sequence; identical to SEQ ID NO: 8233
  Probe

SEQ ID NO: 50988 - DNA, 44 bp, Artificial Sequence; identical to SEQ ID NO: 8234
  Probe

SEQ ID NO: 50989 - DNA, 45 bp, Artificial Sequence; identical to SEQ ID NO: 8235
  Probe

SEQ ID NO: 50990 - DNA, 46 bp, Artificial Sequence; identical to SEQ ID NO: 8236
  Probe

SEQ ID NO: 50991 - DNA, 50 bp, Artificial Sequence; identical to SEQ ID NO: 8238
  Probe

SEQ ID NO: 50992 - DNA, 22 bp, Artificial Sequence
  Probe
tgtagcggttatcacattcgcc

SEQ ID NO: 50993 - DNA, 22 bp, Artificial Sequence
  Probe
tgtagtccgtgcgagaataatg

SEQ ID NO: 50994 - DNA, 18 bp, Artificial Sequence
  Probe
tgtagtggttatcacgtt

SEQ ID NO: 50995 - DNA, 23 bp, Artificial Sequence
  Probe
tgtagtggttatcacgttcgcct

SEQ ID NO: 50996 - DNA, 36 bp, Artificial Sequence; identical to SEQ ID NO: 24487
  Probe

SEQ ID NO: 50997 - DNA, 38 bp, Artificial Sequence; identical to SEQ ID NO: 24489
  Probe

SEQ ID NO: 50998 - DNA, 39 bp, Artificial Sequence; identical to SEQ ID NO: 24490
  Probe

SEQ ID NO: 50999 - DNA, 39 bp, Artificial Sequence; identical to SEQ ID NO: 8248
  Probe

SEQ ID NO: 51000 - DNA, 39 bp, Artificial Sequence; identical to SEQ ID NO: 24499
  Probe

SEQ ID NO: 51001 - DNA, 18 bp, Artificial Sequence
  Probe
tgtatgtctccatctatt

SEQ ID NO: 51002 - DNA, 30 bp, Artificial Sequence
  Probe
tgtatgtctccatctattgatgagggtctt

SEQ ID NO: 51003 - DNA, 35 bp, Artificial Sequence
  Probe
tgtatgtctccatctattgatgagggtcttactct

SEQ ID NO: 51004 - DNA, 44 bp, Artificial Sequence
  Probe
tgtcaaagttaaattataggctaaatcctatatatcttaatggc

SEQ ID NO: 51005 - DNA, 22 bp, Artificial Sequence
  Probe
tgtcacgcgggagaccggggtt

SEQ ID NO: 51006 - DNA, 37 bp, Artificial Sequence; identical to SEQ ID NO: 14448
  Probe

SEQ ID NO: 51007 - DNA, 40 bp, Artificial Sequence; identical to SEQ ID NO: 14449
  Probe

SEQ ID NO: 51008 - DNA, 43 bp, Artificial Sequence; identical to SEQ ID NO: 8254
  Probe

SEQ ID NO: 51009 - DNA, 39 bp, Artificial Sequence; identical to SEQ ID NO: 24516
  Probe

SEQ ID NO: 51010 - DNA, 41 bp, Artificial Sequence; identical to SEQ ID NO: 24517
  Probe

SEQ ID NO: 51011 - DNA, 43 bp, Artificial Sequence; identical to SEQ ID NO: 24518
  Probe

SEQ ID NO: 51012 - DNA, 50 bp, Artificial Sequence; identical to SEQ ID NO: 42149
  Probe

SEQ ID NO: 51013 - DNA, 43 bp, Artificial Sequence; identical to SEQ ID NO: 8255
  Probe

SEQ ID NO: 51014 - DNA, 41 bp, Artificial Sequence; identical to SEQ ID NO: 24521
  Probe

SEQ ID NO: 51015 - DNA, 50 bp, Artificial Sequence; identical to SEQ ID NO: 8256
  Probe

SEQ ID NO: 51016 - DNA, 43 bp, Artificial Sequence; identical to SEQ ID NO: 8257
  Probe

SEQ ID NO: 51017 - DNA, 49 bp, Artificial Sequence; identical to SEQ ID NO: 8258
  Probe

SEQ ID NO: 51018 - DNA, 50 bp, Artificial Sequence; identical to SEQ ID NO: 8259
  Probe

SEQ ID NO: 51019 - DNA, 25 bp, Artificial Sequence
  Probe
tgtctaacaacatggctttctcaac

SEQ ID NO: 51020 - DNA, 29 bp, Artificial Sequence
  Probe
tgtgaatctgacaacagaggcttacgacc

SEQ ID NO: 51021 - DNA, 31 bp, Artificial Sequence; identical to SEQ ID NO: 8264
  Probe

SEQ ID NO: 51022 - DNA, 40 bp, Artificial Sequence; identical to SEQ ID NO: 24531
  Probe

SEQ ID NO: 51023 - DNA, 41 bp, Artificial Sequence; identical to SEQ ID NO: 8269
  Probe

SEQ ID NO: 51024 - DNA, 42 bp, Artificial Sequence; identical to SEQ ID NO: 8270
  Probe

SEQ ID NO: 51025 - DNA, 43 bp, Artificial Sequence; identical to SEQ ID NO: 8271
  Probe

SEQ ID NO: 51026 - DNA, 28 bp, Artificial Sequence
  Probe
tgtgagttcgagcctcacctggagcatt

SEQ ID NO: 51027 - DNA, 29 bp, Artificial Sequence
  Probe
tgtgagttcgagcctcacctggagcattg

SEQ ID NO: 51028 - DNA, 21 bp, Artificial Sequence
  Probe
tgtgctccggagttacctcgt

SEQ ID NO: 51029 - DNA, 22 bp, Artificial Sequence
  Probe
tgtgctccggagttacctcgtt

SEQ ID NO: 51030 - DNA, 23 bp, Artificial Sequence
  Probe
tgtgctccggagttacctcgttt

SEQ ID NO: 51031 - DNA, 24 bp, Artificial Sequence
  Probe
tgtgctccggagttacctcgtttt

SEQ ID NO: 51032 - DNA, 26 bp, Artificial Sequence
  Probe
tgtgggttcgagtcccatctggggtg

SEQ ID NO: 51033 - DNA, 27 bp, Artificial Sequence
  Probe
tgtgggttcgagtcccatctggggtgg

SEQ ID NO: 51034 - DNA, 24 bp, Artificial Sequence
  Probe
tgtgggttcgagtcccatctgggt

SEQ ID NO: 51035 - DNA, 25 bp, Artificial Sequence
  Probe
tgtgggttcgagtcccatctgggtc

SEQ ID NO: 51036 - DNA, 26 bp, Artificial Sequence
  Probe
tgtgggttcgagtcccatctgggtcg

SEQ ID NO: 51037 - DNA, 29 bp, Artificial Sequence
  Probe
tgtgggttcgagtcccatctgggtcgcgt

SEQ ID NO: 51038 - DNA, 39 bp, Artificial Sequence
  Probe
tgttaaccgaaaggttggtggttcgagcccacccaggga

SEQ ID NO: 51039 - DNA, 38 bp, Artificial Sequence; identical to SEQ ID NO: 24544
  Probe

SEQ ID NO: 51040 - DNA, 39 bp, Artificial Sequence; identical to SEQ ID NO: 24545
  Probe

SEQ ID NO: 51041 - DNA, 43 bp, Artificial Sequence; identical to SEQ ID NO: 8277
  Probe

SEQ ID NO: 51042 - DNA, 44 bp, Artificial Sequence; identical to SEQ ID NO: 8278
  Probe

SEQ ID NO: 51043 - DNA, 25 bp, Artificial Sequence
  Probe
tgttcgaatcacgtcggggtcaaac

SEQ ID NO: 51044 - DNA, 17 bp, Artificial Sequence
  Probe
tgtttagacgggctcac

SEQ ID NO: 51045 - DNA, 18 bp, Artificial Sequence
  Probe
tgtttagacgggctcaca

SEQ ID NO: 51046 - DNA, 19 bp, Artificial Sequence
  Probe
tgtttagacgggctcacat

SEQ ID NO: 51047 - DNA, 21 bp, Artificial Sequence
  Probe
tgtttagacgggctcacatca

SEQ ID NO: 51048 - DNA, 26 bp, Artificial Sequence
  Probe
tgtttagacgggctcacatcacccca

SEQ ID NO: 51049 - DNA, 28 bp, Artificial Sequence
  Probe
tgtttagacgggctcacatcaccccata

SEQ ID NO: 51050 - DNA, 29 bp, Artificial Sequence
  Probe
tgtttagacgggctcacatcaccccataa

SEQ ID NO: 51051 - DNA, 32 bp, Artificial Sequence
  Probe
tgtttagacgggctcacatcaccccataaaca

SEQ ID NO: 51052 - DNA, 33 bp, Artificial Sequence
  Probe
tgtttagacgggctcacatcaccccataaacaa

SEQ ID NO: 51053 - DNA, 34 bp, Artificial Sequence; identical to SEQ ID NO: 8288
  Probe

SEQ ID NO: 51054 - DNA, 35 bp, Artificial Sequence; identical to SEQ ID NO: 8289
  Probe

SEQ ID NO: 51055 - DNA, 29 bp, Artificial Sequence
  Probe
tgtttgtgggtttaagtcccattggtcta

SEQ ID NO: 51056 - DNA, 31 bp, Artificial Sequence; identical to SEQ ID NO: 8293
  Probe

SEQ ID NO: 51057 - DNA, 32 bp, Artificial Sequence; identical to SEQ ID NO: 8294
  Probe

SEQ ID NO: 51058 - DNA, 40 bp, Artificial Sequence
  Probe
ttaaaactttacagtcagaggttcaattcctcttcttaac

SEQ ID NO: 51059 - DNA, 38 bp, Artificial Sequence; identical to SEQ ID NO: 35380
  Probe

SEQ ID NO: 51060 - DNA, 39 bp, Artificial Sequence; identical to SEQ ID NO: 8298
  Probe

SEQ ID NO: 51061 - DNA, 31 bp, Artificial Sequence; identical to SEQ ID NO: 8301
  Probe

SEQ ID NO: 51062 - DNA, 32 bp, Artificial Sequence; identical to SEQ ID NO: 8302
  Probe

SEQ ID NO: 51063 - DNA, 33 bp, Artificial Sequence; identical to SEQ ID NO: 8303
  Probe

SEQ ID NO: 51064 - DNA, 34 bp, Artificial Sequence; identical to SEQ ID NO: 8304
  Probe

SEQ ID NO: 51065 - DNA, 49 bp, Artificial Sequence; identical to SEQ ID NO: 1784
  Probe

SEQ ID NO: 51066 - DNA, 50 bp, Artificial Sequence; identical to SEQ ID NO: 1785
  Probe

SEQ ID NO: 51067 - DNA, 34 bp, Artificial Sequence
  Probe
ttaaccgaaaggttggtggttcgagcccacccag

SEQ ID NO: 51068 - DNA, 35 bp, Artificial Sequence
  Probe
ttaaccgaaaggttggtggttcgagcccacccagg

SEQ ID NO: 51069 - DNA, 36 bp, Artificial Sequence; identical to SEQ ID NO: 25864
  Probe

SEQ ID NO: 51070 - DNA, 38 bp, Artificial Sequence
  Probe
ttaaccgaaaggttggtggttcgagcccacccagggac

SEQ ID NO: 51071 - DNA, 39 bp, Artificial Sequence
  Probe
ttaaccgaaaggttggtggttcgagcccacccagggacg

SEQ ID NO: 51072 - DNA, 40 bp, Artificial Sequence; identical to SEQ ID NO: 8307
  Probe

SEQ ID NO: 51073 - DNA, 41 bp, Artificial Sequence; identical to SEQ ID NO: 1787
  Probe

SEQ ID NO: 51074 - DNA, 42 bp, Artificial Sequence; identical to SEQ ID NO: 35397
  Probe

SEQ ID NO: 51075 - DNA, 50 bp, Artificial Sequence
  Probe
ttaaccgaaaggttggtggttcgagcccacccagggacgcctctttgagc

SEQ ID NO: 51076 - DNA, 41 bp, Artificial Sequence; identical to SEQ ID NO: 8308
  Probe

SEQ ID NO: 51077 - DNA, 41 bp, Artificial Sequence; identical to SEQ ID NO: 8309
  Probe

SEQ ID NO: 51078 - DNA, 40 bp, Artificial Sequence
  Probe
ttaaccgaaaggttggtggttcgagcccacccagggacgg

SEQ ID NO: 51079 - DNA, 41 bp, Artificial Sequence
  Probe
ttaaccgaaaggttggtggttcgagcccacccagggacggt

SEQ ID NO: 51080 - DNA, 37 bp, Artificial Sequence
  Probe
ttaaccgaaaggttggtggttcgatcccacccaggga

SEQ ID NO: 51081 - DNA, 49 bp, Artificial Sequence; identical to SEQ ID NO: 8310
  Probe

SEQ ID NO: 51082 - DNA, 50 bp, Artificial Sequence; identical to SEQ ID NO: 8311
  Probe

SEQ ID NO: 51083 - DNA, 32 bp, Artificial Sequence; identical to SEQ ID NO: 8314
  Probe

SEQ ID NO: 51084 - DNA, 34 bp, Artificial Sequence; identical to SEQ ID NO: 8315
  Probe

SEQ ID NO: 51085 - DNA, 39 bp, Artificial Sequence; identical to SEQ ID NO: 8316
  Probe

SEQ ID NO: 51086 - DNA, 40 bp, Artificial Sequence; identical to SEQ ID NO: 8317
  Probe

SEQ ID NO: 51087 - DNA, 41 bp, Artificial Sequence; identical to SEQ ID NO: 8318
  Probe

SEQ ID NO: 51088 - DNA, 42 bp, Artificial Sequence; identical to SEQ ID NO: 8319
  Probe

SEQ ID NO: 51089 - DNA, 20 bp, Artificial Sequence
  Probe
ttaacttgaccgctctgagc

SEQ ID NO: 51090 - DNA, 21 bp, Artificial Sequence
  Probe
ttaacttgaccgctctgagct

SEQ ID NO: 51091 - DNA, 32 bp, Artificial Sequence; identical to SEQ ID NO: 8326
  Probe

SEQ ID NO: 51092 - DNA, 44 bp, Artificial Sequence; identical to SEQ ID NO: 8328
  Probe

SEQ ID NO: 51093 - DNA, 44 bp, Artificial Sequence; identical to SEQ ID NO: 8329
  Probe

SEQ ID NO: 51094 - DNA, 31 bp, Artificial Sequence; identical to SEQ ID NO: 8332
  Probe

SEQ ID NO: 51095 - DNA, 32 bp, Artificial Sequence; identical to SEQ ID NO: 35447
  Probe

SEQ ID NO: 51096 - DNA, 33 bp, Artificial Sequence; identical to SEQ ID NO: 8333
  Probe

SEQ ID NO: 51097 - DNA, 34 bp, Artificial Sequence
  Probe
ttacacttaggagatttcaacttaacttgaccgc

SEQ ID NO: 51098 - DNA, 35 bp, Artificial Sequence; identical to SEQ ID NO: 8334
  Probe

SEQ ID NO: 51099 - DNA, 36 bp, Artificial Sequence; identical to SEQ ID NO: 35449
  Probe

SEQ ID NO: 51100 - DNA, 37 bp, Artificial Sequence; identical to SEQ ID NO: 8335
  Probe

SEQ ID NO: 51101 - DNA, 40 bp, Artificial Sequence; identical to SEQ ID NO: 8337
  Probe

SEQ ID NO: 51102 - DNA, 41 bp, Artificial Sequence; identical to SEQ ID NO: 8338
  Probe

SEQ ID NO: 51103 - DNA, 42 bp, Artificial Sequence; identical to SEQ ID NO: 8339
  Probe

SEQ ID NO: 51104 - DNA, 43 bp, Artificial Sequence; identical to SEQ ID NO: 8340
  Probe

SEQ ID NO: 51105 - DNA, 27 bp, Artificial Sequence
  Probe
ttacagtcagaggttcaattcctcttc

SEQ ID NO: 51106 - DNA, 28 bp, Artificial Sequence
  Probe
ttacagtcagaggttcaattcctcttct

SEQ ID NO: 51107 - DNA, 35 bp, Artificial Sequence
  Probe
ttactttgatagagtaaataataggagcttaaacc

SEQ ID NO: 51108 - DNA, 36 bp, Artificial Sequence; identical to SEQ ID NO: 24605
  Probe

SEQ ID NO: 51109 - DNA, 37 bp, Artificial Sequence; identical to SEQ ID NO: 8347
  Probe

SEQ ID NO: 51110 - DNA, 40 bp, Artificial Sequence
  Probe
ttactttgatagagtaaataataggagcttaaaccccctt

SEQ ID NO: 51111 - DNA, 41 bp, Artificial Sequence; identical to SEQ ID NO: 24609
  Probe

SEQ ID NO: 51112 - DNA, 46 bp, Artificial Sequence
  Probe
ttactttgatagagtaaataataggagcttaaacccccttatttct

SEQ ID NO: 51113 - DNA, 25 bp, Artificial Sequence
  Probe
ttagacgggctcacatcaccccata

SEQ ID NO: 51114 - DNA, 26 bp, Artificial Sequence
  Probe
ttagacgggctcacatcaccccataa

SEQ ID NO: 51115 - DNA, 29 bp, Artificial Sequence
  Probe
ttagacgggctcacatcaccccataaaca

SEQ ID NO: 51116 - DNA, 30 bp, Artificial Sequence; identical to SEQ ID NO: 8357
  Probe

SEQ ID NO: 51117 - DNA, 31 bp, Artificial Sequence; identical to SEQ ID NO: 8358
  Probe

SEQ ID NO: 51118 - DNA, 32 bp, Artificial Sequence; identical to SEQ ID NO: 8359
  Probe

SEQ ID NO: 51119 - DNA, 37 bp, Artificial Sequence; identical to SEQ ID NO: 8364
  Probe

SEQ ID NO: 51120 - DNA, 38 bp, Artificial Sequence; identical to SEQ ID NO: 14458
  Probe

SEQ ID NO: 51121 - DNA, 50 bp, Artificial Sequence; identical to SEQ ID NO: 1795
  Probe

SEQ ID NO: 51122 - DNA, 50 bp, Artificial Sequence; identical to SEQ ID NO: 8365
  Probe

SEQ ID NO: 51123 - DNA, 21 bp, Artificial Sequence
  Probe
ttaggagatttcaacttaact

SEQ ID NO: 51124 - DNA, 25 bp, Artificial Sequence
  Probe
ttaggagatttcaacttaacttgac

SEQ ID NO: 51125 - DNA, 26 bp, Artificial Sequence
  Probe
ttaggagatttcaacttaacttgacc

SEQ ID NO: 51126 - DNA, 27 bp, Artificial Sequence
  Probe
ttaggagatttcaacttaacttgaccg

SEQ ID NO: 51127 - DNA, 29 bp, Artificial Sequence
  Probe
ttaggagatttcaacttaacttgaccgct

SEQ ID NO: 51128 - DNA, 31 bp, Artificial Sequence; identical to SEQ ID NO: 8368
  Probe

SEQ ID NO: 51129 - DNA, 35 bp, Artificial Sequence; identical to SEQ ID NO: 8372
  Probe

SEQ ID NO: 51130 - DNA, 36 bp, Artificial Sequence; identical to SEQ ID NO: 8373
  Probe

SEQ ID NO: 51131 - DNA, 19 bp, Artificial Sequence
  Probe
ttagggtgcgagaggtccc

SEQ ID NO: 51132 - DNA, 50 bp, Artificial Sequence; identical to SEQ ID NO: 8377
  Probe

SEQ ID NO: 51133 - DNA, 21 bp, Artificial Sequence
  Probe
ttcaaatcccggacgagcccc

SEQ ID NO: 51134 - DNA, 23 bp, Artificial Sequence
  Probe
ttcaaatcccggacgagccccct

SEQ ID NO: 51135 - DNA, 21 bp, Artificial Sequence
  Probe
ttcaaatccgggtgccccctc

SEQ ID NO: 51136 - DNA, 23 bp, Artificial Sequence
  Probe
ttcaaatccgggtgccccctcaa

SEQ ID NO: 51137 - DNA, 26 bp, Artificial Sequence
  Probe
ttcaacttaacttgaccgctctgagc

SEQ ID NO: 51138 - DNA, 27 bp, Artificial Sequence
  Probe
ttcaacttaacttgaccgctctgagct

SEQ ID NO: 51139 - DNA, 23 bp, Artificial Sequence
  Probe
ttcaagtccctgttcgggcggca

SEQ ID NO: 51140 - DNA, 23 bp, Artificial Sequence
  Probe
ttcaattcccggtcagggaacca

SEQ ID NO: 51141 - DNA, 42 bp, Artificial Sequence
  Probe
ttcacccaggtggcccgggttcgactcccggtatgggaacaa

SEQ ID NO: 51142 - DNA, 23 bp, Artificial Sequence
  Probe
ttcagttgatgcagagtggggtt

SEQ ID NO: 51143 - DNA, 26 bp, Artificial Sequence
  Probe
ttcagttgatgcagagtggggttttg

SEQ ID NO: 51144 - DNA, 31 bp, Artificial Sequence; identical to SEQ ID NO: 8393
  Probe

SEQ ID NO: 51145 - DNA, 32 bp, Artificial Sequence; identical to SEQ ID NO: 35594
  Probe

SEQ ID NO: 51146 - DNA, 33 bp, Artificial Sequence; identical to SEQ ID NO: 8394
  Probe

SEQ ID NO: 51147 - DNA, 36 bp, Artificial Sequence; identical to SEQ ID NO: 8396
  Probe

SEQ ID NO: 51148 - DNA, 37 bp, Artificial Sequence; identical to SEQ ID NO: 8397
  Probe

SEQ ID NO: 51149 - DNA, 38 bp, Artificial Sequence; identical to SEQ ID NO: 8398
  Probe

SEQ ID NO: 51150 - DNA, 39 bp, Artificial Sequence; identical to SEQ ID NO: 8399
  Probe

SEQ ID NO: 51151 - DNA, 40 bp, Artificial Sequence; identical to SEQ ID NO: 8400
  Probe

SEQ ID NO: 51152 - DNA, 41 bp, Artificial Sequence; identical to SEQ ID NO: 24655
  Probe

SEQ ID NO: 51153 - DNA, 33 bp, Artificial Sequence; identical to SEQ ID NO: 35603
  Probe

SEQ ID NO: 51154 - DNA, 42 bp, Artificial Sequence; identical to SEQ ID NO: 8402
  Probe

SEQ ID NO: 51155 - DNA, 16 bp, Artificial Sequence
  Probe
ttcatattgaattgca

SEQ ID NO: 51156 - DNA, 49 bp, Artificial Sequence; identical to SEQ ID NO: 8404
  Probe

SEQ ID NO: 51157 - DNA, 50 bp, Artificial Sequence; identical to SEQ ID NO: 8405
  Probe

SEQ ID NO: 51158 - DNA, 41 bp, Artificial Sequence; identical to SEQ ID NO: 8406
  Probe

SEQ ID NO: 51159 - DNA, 42 bp, Artificial Sequence; identical to SEQ ID NO: 8407
  Probe

SEQ ID NO: 51160 - DNA, 44 bp, Artificial Sequence; identical to SEQ ID NO: 8412
  Probe

SEQ ID NO: 51161 - DNA, 22 bp, Artificial Sequence
  Probe
ttccccgcacaggttcgaatcc

SEQ ID NO: 51162 - DNA, 23 bp, Artificial Sequence
  Probe
ttccccgcacaggttcgaatcct

SEQ ID NO: 51163 - DNA, 31 bp, Artificial Sequence
  Probe
ttccccgcacaggttcgaatcctgttcgtga

SEQ ID NO: 51164 - DNA, 17 bp, Artificial Sequence
  Probe
ttcccgggcggcgcact

SEQ ID NO: 51165 - DNA, 18 bp, Artificial Sequence
  Probe
ttcccggtcagggaacca

SEQ ID NO: 51166 - DNA, 23 bp, Artificial Sequence
  Probe
ttccctggtggtctagtggttag

SEQ ID NO: 51167 - DNA, 24 bp, Artificial Sequence
  Probe
ttccctggtggtctagtggttagg

SEQ ID NO: 51168 - DNA, 32 bp, Artificial Sequence; identical to SEQ ID NO: 42231
  Probe

SEQ ID NO: 51169 - DNA, 34 bp, Artificial Sequence; identical to SEQ ID NO: 24676
  Probe

SEQ ID NO: 51170 - DNA, 31 bp, Artificial Sequence; identical to SEQ ID NO: 14469
  Probe

SEQ ID NO: 51171 - DNA, 26 bp, Artificial Sequence
  Probe
ttccgtagtgtagtggtcatcacgtt

SEQ ID NO: 51172 - DNA, 31 bp, Artificial Sequence; identical to SEQ ID NO: 8421
  Probe

SEQ ID NO: 51173 - DNA, 33 bp, Artificial Sequence; identical to SEQ ID NO: 8422
  Probe

SEQ ID NO: 51174 - DNA, 26 bp, Artificial Sequence
  Probe
ttccgtagtgtagtggttatcacgtt

SEQ ID NO: 51175 - DNA, 29 bp, Artificial Sequence
  Probe
ttccgtagtgtagtggttatcacgttcgc

SEQ ID NO: 51176 - DNA, 30 bp, Artificial Sequence; identical to SEQ ID NO: 8425
  Probe

SEQ ID NO: 51177 - DNA, 31 bp, Artificial Sequence; identical to SEQ ID NO: 8426
  Probe

SEQ ID NO: 51178 - DNA, 50 bp, Artificial Sequence; identical to SEQ ID NO: 24697
  Probe

SEQ ID NO: 51179 - DNA, 32 bp, Artificial Sequence; identical to SEQ ID NO: 8427
  Probe

SEQ ID NO: 51180 - DNA, 33 bp, Artificial Sequence; identical to SEQ ID NO: 8428
  Probe

SEQ ID NO: 51181 - DNA, 50 bp, Artificial Sequence; identical to SEQ ID NO: 24701
  Probe

SEQ ID NO: 51182 - DNA, 50 bp, Artificial Sequence; identical to SEQ ID NO: 8432
  Probe

SEQ ID NO: 51183 - DNA, 35 bp, Artificial Sequence; identical to SEQ ID NO: 8437
  Probe

SEQ ID NO: 51184 - DNA, 36 bp, Artificial Sequence; identical to SEQ ID NO: 8438
  Probe

SEQ ID NO: 51185 - DNA, 22 bp, Artificial Sequence
  Probe
ttcgaatcccaccgctgccaca

SEQ ID NO: 51186 - DNA, 23 bp, Artificial Sequence
  Probe
ttcgaatcccaccgctgccacac

SEQ ID NO: 51187 - DNA, 20 bp, Artificial Sequence
  Probe
ttcgaatcccactcctgaca

SEQ ID NO: 51188 - DNA, 21 bp, Artificial Sequence
  Probe
ttcgaatcccactcctgacaa

SEQ ID NO: 51189 - DNA, 21 bp, Artificial Sequence
  Probe
ttcgaatcccactcctgacag

SEQ ID NO: 51190 - DNA, 20 bp, Artificial Sequence
  Probe
ttcgaatcccacttctgaca

SEQ ID NO: 51191 - DNA, 23 bp, Artificial Sequence
  Probe
ttcgaatcccacttctgacacaa

SEQ ID NO: 51192 - DNA, 23 bp, Artificial Sequence
  Probe
ttcgaatcccagcggtgcctccg

SEQ ID NO: 51193 - DNA, 23 bp, Artificial Sequence
  Probe
ttcgaatcctgccgactacggca

SEQ ID NO: 51194 - DNA, 23 bp, Artificial Sequence
  Probe
ttcgaatcctgccgactacgtca

SEQ ID NO: 51195 - DNA, 34 bp, Artificial Sequence; identical to SEQ ID NO: 24713
  Probe

SEQ ID NO: 51196 - DNA, 37 bp, Artificial Sequence; identical to SEQ ID NO: 8443
  Probe

SEQ ID NO: 51197 - DNA, 38 bp, Artificial Sequence; identical to SEQ ID NO: 24714
  Probe

SEQ ID NO: 51198 - DNA, 39 bp, Artificial Sequence; identical to SEQ ID NO: 8444
  Probe

SEQ ID NO: 51199 - DNA, 23 bp, Artificial Sequence
  Probe
ttcgactcccggtatgggaacaa

SEQ ID NO: 51200 - DNA, 22 bp, Artificial Sequence
  Probe
ttcgactcccggtgtgggaacg

SEQ ID NO: 51201 - DNA, 23 bp, Artificial Sequence
  Probe
ttcgactcccggtgtgggaacgc

SEQ ID NO: 51202 - DNA, 18 bp, Artificial Sequence
  Probe
ttcgagcccacccaggga

SEQ ID NO: 51203 - DNA, 22 bp, Artificial Sequence
  Probe
ttcgagcccacccagggacgcc

SEQ ID NO: 51204 - DNA, 23 bp, Artificial Sequence
  Probe
ttcgagcccacccagggacgcct

SEQ ID NO: 51205 - DNA, 20 bp, Artificial Sequence
  Probe
ttcgagcctcacctggagca

SEQ ID NO: 51206 - DNA, 23 bp, Artificial Sequence
  Probe
ttcgagtcccacctggggtgtcg

SEQ ID NO: 51207 - DNA, 23 bp, Artificial Sequence
  Probe
ttcgagtcccatctgggtcgcgt

SEQ ID NO: 51208 - DNA, 23 bp, Artificial Sequence
  Probe
ttcgagtcccttcgtggtcgttg

SEQ ID NO: 51209 - DNA, 20 bp, Artificial Sequence
  Probe
ttcgatccccggcatctcca

SEQ ID NO: 51210 - DNA, 23 bp, Artificial Sequence
  Probe
ttcgatccccggcatctccattg

SEQ ID NO: 51211 - DNA, 23 bp, Artificial Sequence
  Probe
ttcgatccccgtacgggccacga

SEQ ID NO: 51212 - DNA, 23 bp, Artificial Sequence
  Probe
ttcgatccccgtacgggccactg

SEQ ID NO: 51213 - DNA, 20 bp, Artificial Sequence
  Probe
ttcgatcccgggtttcggca

SEQ ID NO: 51214 - DNA, 23 bp, Artificial Sequence
  Probe
ttcgatcctcacacggggcacaa

SEQ ID NO: 51215 - DNA, 21 bp, Artificial Sequence
  Probe
ttcgattccccgacggggaga

SEQ ID NO: 51216 - DNA, 22 bp, Artificial Sequence
  Probe
ttcgattccccgacggggagac

SEQ ID NO: 51217 - DNA, 21 bp, Artificial Sequence
  Probe
ttcgattccccgacggggagg

SEQ ID NO: 51218 - DNA, 22 bp, Artificial Sequence
  Probe
ttcgattccccgacggggaggc

SEQ ID NO: 51219 - DNA, 23 bp, Artificial Sequence
  Probe
ttcgattccccgacggggaggca

SEQ ID NO: 51220 - DNA, 20 bp, Artificial Sequence
  Probe
ttcgattcccggccaacgca

SEQ ID NO: 51221 - DNA, 23 bp, Artificial Sequence
  Probe
ttcgattcccggccaacgcaagt

SEQ ID NO: 51222 - DNA, 23 bp, Artificial Sequence
  Probe
ttcgattcccggccaacgcagtg

SEQ ID NO: 51223 - DNA, 23 bp, Artificial Sequence
  Probe
ttcgattcccggccaatgcacga

SEQ ID NO: 51224 - DNA, 23 bp, Artificial Sequence
  Probe
ttcgattcccggccaatgcagca

SEQ ID NO: 51225 - DNA, 23 bp, Artificial Sequence
  Probe
ttcgattcccgggcggcgcactt

SEQ ID NO: 51226 - DNA, 23 bp, Artificial Sequence
  Probe
ttcgattcccggtcagggaacaa

SEQ ID NO: 51227 - DNA, 23 bp, Artificial Sequence
  Probe
ttcgattcccggtcatggaacca

SEQ ID NO: 51228 - DNA, 23 bp, Artificial Sequence
  Probe
ttcgattcctggtcagggaacca

SEQ ID NO: 51229 - DNA, 19 bp, Artificial Sequence
  Probe
ttcgggtgcgagaggtccc

SEQ ID NO: 51230 - DNA, 37 bp, Artificial Sequence; identical to SEQ ID NO: 8466
  Probe

SEQ ID NO: 51231 - DNA, 38 bp, Artificial Sequence; identical to SEQ ID NO: 8468
  Probe

SEQ ID NO: 51232 - DNA, 25 bp, Artificial Sequence
  Probe
ttgacaacattcaaaaaagagtaat

SEQ ID NO: 51233 - DNA, 26 bp, Artificial Sequence
  Probe
ttgacaacattcaaaaaagagtaata

SEQ ID NO: 51234 - DNA, 44 bp, Artificial Sequence; identical to SEQ ID NO: 8472
  Probe

SEQ ID NO: 51235 - DNA, 45 bp, Artificial Sequence; identical to SEQ ID NO: 8473
  Probe

SEQ ID NO: 51236 - DNA, 26 bp, Artificial Sequence
  Probe
ttgatgcagagtggggttttgcagtc

SEQ ID NO: 51237 - DNA, 43 bp, Artificial Sequence; identical to SEQ ID NO: 8477
  Probe

SEQ ID NO: 51238 - DNA, 17 bp, Artificial Sequence
  Probe
ttgccatgttaacgttt

SEQ ID NO: 51239 - DNA, 18 bp, Artificial Sequence
  Probe
ttgccatgttaacgtttt

SEQ ID NO: 51240 - DNA, 30 bp, Artificial Sequence
  Probe
ttgcgtgttcaaatcacgtcggggtcaaca

SEQ ID NO: 51241 - DNA, 43 bp, Artificial Sequence
  Probe
ttgcgttcagttgatgcagagtggggttttgcagtccttagct

SEQ ID NO: 51242 - DNA, 50 bp, Artificial Sequence; identical to SEQ ID NO: 8478
  Probe

SEQ ID NO: 51243 - DNA, 41 bp, Artificial Sequence; identical to SEQ ID NO: 8481
  Probe

SEQ ID NO: 51244 - DNA, 24 bp, Artificial Sequence
  Probe
ttggtcgtggttgtagtccgtgcg

SEQ ID NO: 51245 - DNA, 26 bp, Artificial Sequence
  Probe
ttggtcgtggttgtagtccgtgcgag

SEQ ID NO: 51246 - DNA, 27 bp, Artificial Sequence
  Probe
ttggtcgtggttgtagtccgtgcgaga

SEQ ID NO: 51247 - DNA, 28 bp, Artificial Sequence
  Probe
ttggtcgtggttgtagtccgtgcgagaa

SEQ ID NO: 51248 - DNA, 29 bp, Artificial Sequence
  Probe
ttggtggttcagtggtagaattctcgcct

SEQ ID NO: 51249 - DNA, 32 bp, Artificial Sequence; identical to SEQ ID NO: 8493
  Probe

SEQ ID NO: 51250 - DNA, 24 bp, Artificial Sequence
  Probe
ttggtggttcgagcccacccaggg

SEQ ID NO: 51251 - DNA, 25 bp, Artificial Sequence
  Probe
ttggtggttcgagcccacccaggga

SEQ ID NO: 51252 - DNA, 27 bp, Artificial Sequence
  Probe
ttggtggttcgagcccacccagggacg

SEQ ID NO: 51253 - DNA, 28 bp, Artificial Sequence
  Probe
ttggtggttcgagcccacccagggacgc

SEQ ID NO: 51254 - DNA, 29 bp, Artificial Sequence
  Probe
ttggtggttcgagcccacccagggacgcc

SEQ ID NO: 51255 - DNA, 36 bp, Artificial Sequence; identical to SEQ ID NO: 1800
  Probe

SEQ ID NO: 51256 - DNA, 37 bp, Artificial Sequence; identical to SEQ ID NO: 8497
  Probe

SEQ ID NO: 51257 - DNA, 38 bp, Artificial Sequence; identical to SEQ ID NO: 8498
  Probe

SEQ ID NO: 51258 - DNA, 39 bp, Artificial Sequence; identical to SEQ ID NO: 8499
  Probe

SEQ ID NO: 51259 - DNA, 44 bp, Artificial Sequence; identical to SEQ ID NO: 8511
  Probe

SEQ ID NO: 51260 - DNA, 35 bp, Artificial Sequence; identical to SEQ ID NO: 8515
  Probe

SEQ ID NO: 51261 - DNA, 45 bp, Artificial Sequence; identical to SEQ ID NO: 8516
  Probe

SEQ ID NO: 51262 - DNA, 50 bp, Artificial Sequence; identical to SEQ ID NO: 8517
  Probe

SEQ ID NO: 51263 - DNA, 45 bp, Artificial Sequence; identical to SEQ ID NO: 24797
  Probe

SEQ ID NO: 51264 - DNA, 30 bp, Artificial Sequence; identical to SEQ ID NO: 24800
  Probe

SEQ ID NO: 51265 - DNA, 33 bp, Artificial Sequence; identical to SEQ ID NO: 8521
  Probe

SEQ ID NO: 51266 - DNA, 30 bp, Artificial Sequence; identical to SEQ ID NO: 24807
  Probe

SEQ ID NO: 51267 - DNA, 32 bp, Artificial Sequence; identical to SEQ ID NO: 8526
  Probe

SEQ ID NO: 51268 - DNA, 33 bp, Artificial Sequence; identical to SEQ ID NO: 8527
  Probe

SEQ ID NO: 51269 - DNA, 27 bp, Artificial Sequence
  Probe
tttcaacttaacttgaccgctctgagc

SEQ ID NO: 51270 - DNA, 28 bp, Artificial Sequence
  Probe
tttcaacttaacttgaccgctctgagct

SEQ ID NO: 51271 - DNA, 30 bp, Artificial Sequence
  Probe
tttccgtagtgtagcggttatcacattcgc

SEQ ID NO: 51272 - DNA, 27 bp, Artificial Sequence
  Probe
tttccgtagtgtagtggttatcacgtt

SEQ ID NO: 51273 - DNA, 30 bp, Artificial Sequence; identical to SEQ ID NO: 24813
  Probe

SEQ ID NO: 51274 - DNA, 31 bp, Artificial Sequence; identical to SEQ ID NO: 24814
  Probe

SEQ ID NO: 51275 - DNA, 32 bp, Artificial Sequence; identical to SEQ ID NO: 24815
  Probe

SEQ ID NO: 51276 - DNA, 40 bp, Artificial Sequence
  Probe
tttcgactcattaaattatgataatcatatttaccaaatg

SEQ ID NO: 51277 - DNA, 45 bp, Artificial Sequence; identical to SEQ ID NO: 8531
  Probe

SEQ ID NO: 51278 - DNA, 46 bp, Artificial Sequence; identical to SEQ ID NO: 8532
  Probe

SEQ ID NO: 51279 - DNA, 19 bp, Artificial Sequence
  Probe
tttgggtgcgagaggtccc

SEQ ID NO: 51280 - DNA, 42 bp, Artificial Sequence; identical to SEQ ID NO: 24831
  Probe

SEQ ID NO: 51281 - DNA, 36 bp, Artificial Sequence; identical to SEQ ID NO: 36038
  Probe

SEQ ID NO: 51282 - DNA, 44 bp, Artificial Sequence
  Probe
tttgtcaaagttaaattataggctaaatcctatatatcttaatg

SEQ ID NO: 51283 - DNA, 25 bp, Artificial Sequence
  Probe
tttgtgggtttaagtcccattggtc

SEQ ID NO: 51284 - DNA, 26 bp, Artificial Sequence
  Probe
tttgtgggtttaagtcccattggtct

SEQ ID NO: 51285 - DNA, 50 bp, Artificial Sequence
  Probe
ttttaagttaaagattaagagaaccaacacctctttacagtgaaatgccc

SEQ ID NO: 51286 - DNA, 50 bp, Artificial Sequence; identical to SEQ ID NO: 39
  Probe

SEQ ID NO: 51287 - DNA, 50 bp, Artificial Sequence; identical to SEQ ID NO: 47
  Probe

SEQ ID NO: 51288 - DNA, 38 bp, Artificial Sequence; identical to SEQ ID NO: 61
  Probe

SEQ ID NO: 51289 - DNA, 50 bp, Artificial Sequence; identical to SEQ ID NO: 117
  Probe

SEQ ID NO: 51290 - DNA, 50 bp, Artificial Sequence; identical to SEQ ID NO: 124
  Probe

SEQ ID NO: 51291 - DNA, 20 bp, Artificial Sequence
  Probe
acacgcgaaaggtccccggt

SEQ ID NO: 51292 - DNA, 35 bp, Artificial Sequence; identical to SEQ ID NO: 12530
  Probe

SEQ ID NO: 51293 - DNA, 41 bp, Artificial Sequence; identical to SEQ ID NO: 44433
  Probe

SEQ ID NO: 51294 - DNA, 50 bp, Artificial Sequence; identical to SEQ ID NO: 138
  Probe

SEQ ID NO: 51295 - DNA, 17 bp, Artificial Sequence
  Probe
acgccaaggtcgcgggt

SEQ ID NO: 51296 - DNA, 18 bp, Artificial Sequence
  Probe
acgcgaaaggtccccggt

SEQ ID NO: 51297 - DNA, 17 bp, Artificial Sequence
  Probe
acgcgggagaccggggt

SEQ ID NO: 51298 - DNA, 18 bp, Artificial Sequence
  Probe
acgcgggagaccggggtt

SEQ ID NO: 51299 - DNA, 17 bp, Artificial Sequence
  Probe
acgcgggaggcccgggt

SEQ ID NO: 51300 - DNA, 18 bp, Artificial Sequence
  Probe
acgcgggaggcccgggtt

SEQ ID NO: 51301 - DNA, 19 bp, Artificial Sequence
  Probe
acgcgggaggcccgggttt

SEQ ID NO: 51302 - DNA, 34 bp, Artificial Sequence; identical to SEQ ID NO: 197
  Probe

SEQ ID NO: 51303 - DNA, 23 bp, Artificial Sequence
  Probe
actttgaatccagcgatccgagt

SEQ ID NO: 51304 - DNA, 24 bp, Artificial Sequence
  Probe
actttgaatccagcgatccgagtt

SEQ ID NO: 51305 - DNA, 39 bp, Artificial Sequence; identical to SEQ ID NO: 205
  Probe

SEQ ID NO: 51306 - DNA, 31 bp, Artificial Sequence; identical to SEQ ID NO: 210
  Probe

SEQ ID NO: 51307 - DNA, 32 bp, Artificial Sequence; identical to SEQ ID NO: 211
  Probe

SEQ ID NO: 51308 - DNA, 22 bp, Artificial Sequence
  Probe
agaccggggttcgattccccga

SEQ ID NO: 51309 - DNA, 19 bp, Artificial Sequence
  Probe
agagcccggtaatcgcata

SEQ ID NO: 51310 - DNA, 26 bp, Artificial Sequence
  Probe
agagcccggtaatcgcataaaactta

SEQ ID NO: 51311 - DNA, 50 bp, Artificial Sequence; identical to SEQ ID NO: 3146
  Probe

SEQ ID NO: 51312 - DNA, 29 bp, Artificial Sequence
  Probe
agcactctggactctgaatccagcgatcc

SEQ ID NO: 51313 - DNA, 30 bp, Artificial Sequence; identical to SEQ ID NO: 270
  Probe

SEQ ID NO: 51314 - DNA, 29 bp, Artificial Sequence
  Probe
agcactctggactttgaatccagcgatcc

SEQ ID NO: 51315 - DNA, 29 bp, Artificial Sequence
  Probe
agcatagctgccttccaagcagttgaccc

SEQ ID NO: 51316 - DNA, 30 bp, Artificial Sequence; identical to SEQ ID NO: 3263
  Probe

SEQ ID NO: 51317 - DNA, 35 bp, Artificial Sequence; identical to SEQ ID NO: 280
  Probe

SEQ ID NO: 51318 - DNA, 36 bp, Artificial Sequence; identical to SEQ ID NO: 281
  Probe

SEQ ID NO: 51319 - DNA, 50 bp, Artificial Sequence; identical to SEQ ID NO: 285
  Probe

SEQ ID NO: 51320 - DNA, 50 bp, Artificial Sequence; identical to SEQ ID NO: 3312
  Probe

SEQ ID NO: 51321 - DNA, 36 bp, Artificial Sequence; identical to SEQ ID NO: 12701
  Probe

SEQ ID NO: 51322 - DNA, 36 bp, Artificial Sequence; identical to SEQ ID NO: 16503
  Probe

SEQ ID NO: 51323 - DNA, 31 bp, Artificial Sequence; identical to SEQ ID NO: 315
  Probe

SEQ ID NO: 51324 - DNA, 29 bp, Artificial Sequence
  Probe
aggattcctggttttcacccaggcggccc

SEQ ID NO: 51325 - DNA, 28 bp, Artificial Sequence
  Probe
aggattcggcgctctcaccgccgcggcc

SEQ ID NO: 51326 - DNA, 29 bp, Artificial Sequence
  Probe
aggattcggcgctctcaccgccgcggccc

SEQ ID NO: 51327 - DNA, 30 bp, Artificial Sequence; identical to SEQ ID NO: 16665
  Probe

SEQ ID NO: 51328 - DNA, 17 bp, Artificial Sequence
  Probe
aggggtatgattctcgg

SEQ ID NO: 51329 - DNA, 18 bp, Artificial Sequence
  Probe
aggggtatgattctcggt

SEQ ID NO: 51330 - DNA, 16 bp, Artificial Sequence
  Probe
agtcggtagagcatca

SEQ ID NO: 51331 - DNA, 17 bp, Artificial Sequence
  Probe
agtcggtagagcatcag

SEQ ID NO: 51332 - DNA, 18 bp, Artificial Sequence
  Probe
agtcggtagagcatcaga

SEQ ID NO: 51333 - DNA, 19 bp, Artificial Sequence
  Probe
agtcggtagagcatcagac

SEQ ID NO: 51334 - DNA, 18 bp, Artificial Sequence
  Probe
agtcggtagagcatggga

SEQ ID NO: 51335 - DNA, 19 bp, Artificial Sequence
  Probe
agtcggtagagcatgggac

SEQ ID NO: 51336 - DNA, 22 bp, Artificial Sequence
  Probe
agtctcataatctgaaggtcgt

SEQ ID NO: 51337 - DNA, 23 bp, Artificial Sequence
  Probe
agtctcataatctgaaggtcgtg

SEQ ID NO: 51338 - DNA, 24 bp, Artificial Sequence
  Probe
agtctcataatctgaaggtcgtga

SEQ ID NO: 51339 - DNA, 25 bp, Artificial Sequence
  Probe
agtctcataatctgaaggtcgtgag

SEQ ID NO: 51340 - DNA, 26 bp, Artificial Sequence
  Probe
agtctcataatctgaaggtcgtgagt

SEQ ID NO: 51341 - DNA, 27 bp, Artificial Sequence
  Probe
agtctcataatctgaaggtcgtgagtt

SEQ ID NO: 51342 - DNA, 18 bp, Artificial Sequence
  Probe
agtggttaggattcggcg

SEQ ID NO: 51343 - DNA, 19 bp, Artificial Sequence
  Probe
agtggttaggattcggcgc

SEQ ID NO: 51344 - DNA, 20 bp, Artificial Sequence
  Probe
agtggttaggattcggcgct

SEQ ID NO: 51345 - DNA, 24 bp, Artificial Sequence
  Probe
agtggttaggattcggcgctctca

SEQ ID NO: 51346 - DNA, 25 bp, Artificial Sequence
  Probe
agtggttaggattcggcgctctcac

SEQ ID NO: 51347 - DNA, 29 bp, Artificial Sequence
  Probe
agtggttaggattcggcgctctcaccgcc

SEQ ID NO: 51348 - DNA, 31 bp, Artificial Sequence; identical to SEQ ID NO: 16956
  Probe

SEQ ID NO: 51349 - DNA, 35 bp, Artificial Sequence; identical to SEQ ID NO: 12776
  Probe

SEQ ID NO: 51350 - DNA, 36 bp, Artificial Sequence; identical to SEQ ID NO: 361
  Probe

SEQ ID NO: 51351 - DNA, 37 bp, Artificial Sequence; identical to SEQ ID NO: 12778
  Probe

SEQ ID NO: 51352 - DNA, 18 bp, Artificial Sequence
  Probe
agtggttagtactctgcg

SEQ ID NO: 51353 - DNA, 18 bp, Artificial Sequence
  Probe
agtggttagtatccccgc

SEQ ID NO: 51354 - DNA, 20 bp, Artificial Sequence
  Probe
ataacgccaaggtcgcgggt

SEQ ID NO: 51355 - DNA, 16 bp, Artificial Sequence
  Probe
atcccaccgctgccac

SEQ ID NO: 51356 - DNA, 19 bp, Artificial Sequence
  Probe
atccccggcacctccacca

SEQ ID NO: 51357 - DNA, 16 bp, Artificial Sequence
  Probe
attcccattcttgcga

SEQ ID NO: 51358 - DNA, 50 bp, Artificial Sequence; identical to SEQ ID NO: 437
  Probe

SEQ ID NO: 51359 - DNA, 50 bp, Artificial Sequence; identical to SEQ ID NO: 447
  Probe

SEQ ID NO: 51360 - DNA, 21 bp, Artificial Sequence
  Probe
caatccccggcacctccacca

SEQ ID NO: 51361 - DNA, 27 bp, Artificial Sequence
  Probe
cactctggactctgaatccagcgatcc

SEQ ID NO: 51362 - DNA, 28 bp, Artificial Sequence
  Probe
cactgtaaagctaacttagcattaacct

SEQ ID NO: 51363 - DNA, 30 bp, Artificial Sequence; identical to SEQ ID NO: 493
  Probe

SEQ ID NO: 51364 - DNA, 32 bp, Artificial Sequence; identical to SEQ ID NO: 495
  Probe

SEQ ID NO: 51365 - DNA, 41 bp, Artificial Sequence; identical to SEQ ID NO: 500
  Probe

SEQ ID NO: 51366 - DNA, 44 bp, Artificial Sequence; identical to SEQ ID NO: 4184
  Probe

SEQ ID NO: 51367 - DNA, 24 bp, Artificial Sequence
  Probe
cagagaatagtttaaattagaatc

SEQ ID NO: 51368 - DNA, 30 bp, Artificial Sequence; identical to SEQ ID NO: 519
  Probe

SEQ ID NO: 51369 - DNA, 32 bp, Artificial Sequence; identical to SEQ ID NO: 521
  Probe

SEQ ID NO: 51370 - DNA, 16 bp, Artificial Sequence
  Probe
cagtcggtagagcatc

SEQ ID NO: 51371 - DNA, 27 bp, Artificial Sequence
  Probe
cagtctcataatctgaaggtcgtgagt

SEQ ID NO: 51372 - DNA, 21 bp, Artificial Sequence
  Probe
cataatctgaaggtcgtgagt

SEQ ID NO: 51373 - DNA, 18 bp, Artificial Sequence
  Probe
catgcaagattcccattc

SEQ ID NO: 51374 - DNA, 46 bp, Artificial Sequence; identical to SEQ ID NO: 558
  Probe

SEQ ID NO: 51375 - DNA, 28 bp, Artificial Sequence
  Probe
ccacatggtctagcggttaggattcctg

SEQ ID NO: 51376 - DNA, 29 bp, Artificial Sequence
  Probe
ccacatggtctagcggttaggattcctgg

SEQ ID NO: 51377 - DNA, 19 bp, Artificial Sequence
  Probe
ccacgcgggaggcccgggt

SEQ ID NO: 51378 - DNA, 20 bp, Artificial Sequence
  Probe
ccacgcgggaggcccgggtt

SEQ ID NO: 51379 - DNA, 21 bp, Artificial Sequence
  Probe
ccacgcgggaggcccgggttt

SEQ ID NO: 51380 - DNA, 16 bp, Artificial Sequence
  Probe
cccattcttgcgaccc

SEQ ID NO: 51381 - DNA, 29 bp, Artificial Sequence
  Probe
cccattcttgcgacccgggttcgattccc

SEQ ID NO: 51382 - DNA, 35 bp, Artificial Sequence; identical to SEQ ID NO: 598
  Probe

SEQ ID NO: 51383 - DNA, 37 bp, Artificial Sequence; identical to SEQ ID NO: 599
  Probe

SEQ ID NO: 51384 - DNA, 39 bp, Artificial Sequence; identical to SEQ ID NO: 600
  Probe

SEQ ID NO: 51385 - DNA, 40 bp, Artificial Sequence; identical to SEQ ID NO: 4654
  Probe

SEQ ID NO: 51386 - DNA, 17 bp, Artificial Sequence
  Probe
ccccggcacctccacca

SEQ ID NO: 51387 - DNA, 30 bp, Artificial Sequence; identical to SEQ ID NO: 615
  Probe

SEQ ID NO: 51388 - DNA, 25 bp, Artificial Sequence
  Probe
cccggctagctcagtcggtagagca

SEQ ID NO: 51389 - DNA, 30 bp, Artificial Sequence; identical to SEQ ID NO: 4750
  Probe

SEQ ID NO: 51390 - DNA, 32 bp, Artificial Sequence; identical to SEQ ID NO: 639
  Probe

SEQ ID NO: 51391 - DNA, 27 bp, Artificial Sequence
  Probe
ccgctggtgtagtggtatcatgcaaga

SEQ ID NO: 51392 - DNA, 34 bp, Artificial Sequence; identical to SEQ ID NO: 13026
  Probe

SEQ ID NO: 51393 - DNA, 36 bp, Artificial Sequence; identical to SEQ ID NO: 13027
  Probe

SEQ ID NO: 51394 - DNA, 28 bp, Artificial Sequence
  Probe
ccggatagctcagtcggtagagcatcag

SEQ ID NO: 51395 - DNA, 29 bp, Artificial Sequence
  Probe
ccggatagctcagtcggtagagcatcaga

SEQ ID NO: 51396 - DNA, 30 bp, Artificial Sequence; identical to SEQ ID NO: 668
  Probe

SEQ ID NO: 51397 - DNA, 24 bp, Artificial Sequence
  Probe
ccggctagctcagtcggtagagca

SEQ ID NO: 51398 - DNA, 29 bp, Artificial Sequence
  Probe
ccggctagctcagtcggtagagcatgaga

SEQ ID NO: 51399 - DNA, 30 bp, Artificial Sequence; identical to SEQ ID NO: 675
  Probe

SEQ ID NO: 51400 - DNA, 29 bp, Artificial Sequence
  Probe
ccggctagctcagtcggtagagcatggga

SEQ ID NO: 51401 - DNA, 30 bp, Artificial Sequence; identical to SEQ ID NO: 680
  Probe

SEQ ID NO: 51402 - DNA, 31 bp, Artificial Sequence; identical to SEQ ID NO: 681
  Probe

SEQ ID NO: 51403 - DNA, 32 bp, Artificial Sequence; identical to SEQ ID NO: 682
  Probe

SEQ ID NO: 51404 - DNA, 28 bp, Artificial Sequence
  Probe
ccgtagtgtagtggtcatcacgttcgcc

SEQ ID NO: 51405 - DNA, 29 bp, Artificial Sequence
  Probe
ccgtgatcgtatagtggttagtactctgc

SEQ ID NO: 51406 - DNA, 23 bp, Artificial Sequence
  Probe
cctgccacgcgggaggcccgggt

SEQ ID NO: 51407 - DNA, 24 bp, Artificial Sequence
  Probe
cctgccacgcgggaggcccgggtt

SEQ ID NO: 51408 - DNA, 25 bp, Artificial Sequence
  Probe
cctgccacgcgggaggcccgggttt

SEQ ID NO: 51409 - DNA, 23 bp, Artificial Sequence
  Probe
cctgtcacgcgggagaccggggt

SEQ ID NO: 51410 - DNA, 24 bp, Artificial Sequence
  Probe
cctgtcacgcgggagaccggggtt

SEQ ID NO: 51411 - DNA, 19 bp, Artificial Sequence
  Probe
ccttccaagcagttgaccc

SEQ ID NO: 51412 - DNA, 24 bp, Artificial Sequence
  Probe
ccttccaagcagttgacccgggtt

SEQ ID NO: 51413 - DNA, 16 bp, Artificial Sequence
  Probe
cgcgggaggcccgggt

SEQ ID NO: 51414 - DNA, 27 bp, Artificial Sequence
  Probe
cggatagctcagtcggtagagcatcag

SEQ ID NO: 51415 - DNA, 28 bp, Artificial Sequence
  Probe
cggatagctcagtcggtagagcatcaga

SEQ ID NO: 51416 - DNA, 28 bp, Artificial Sequence
  Probe
cggctagctcagtcggtagagcatgaga

SEQ ID NO: 51417 - DNA, 29 bp, Artificial Sequence
  Probe
cggctagctcagtcggtagagcatgagac

SEQ ID NO: 51418 - DNA, 27 bp, Artificial Sequence
  Probe
cggctagctcagtcggtagagcatggg

SEQ ID NO: 51419 - DNA, 28 bp, Artificial Sequence
  Probe
cggctagctcagtcggtagagcatggga

SEQ ID NO: 51420 - DNA, 29 bp, Artificial Sequence
  Probe
cggctagctcagtcggtagagcatgggac

SEQ ID NO: 51421 - DNA, 30 bp, Artificial Sequence; identical to SEQ ID NO: 778
  Probe

SEQ ID NO: 51422 - DNA, 31 bp, Artificial Sequence; identical to SEQ ID NO: 779
  Probe

SEQ ID NO: 51423 - DNA, 34 bp, Artificial Sequence; identical to SEQ ID NO: 13220
  Probe

SEQ ID NO: 51424 - DNA, 34 bp, Artificial Sequence; identical to SEQ ID NO: 13221
  Probe

SEQ ID NO: 51425 - DNA, 20 bp, Artificial Sequence
  Probe
ctaagccagggattgtgggt

SEQ ID NO: 51426 - DNA, 18 bp, Artificial Sequence
  Probe
ctaatggataaggcattg

SEQ ID NO: 51427 - DNA, 37 bp, Artificial Sequence
  Probe
ctagtggttaggattcggcgctctcaccgccgcggcc

SEQ ID NO: 51428 - DNA, 38 bp, Artificial Sequence; identical to SEQ ID NO: 13244
  Probe

SEQ ID NO: 51429 - DNA, 39 bp, Artificial Sequence
  Probe
ctagtggttaggattcggcgctctcaccgccgcggcccg

SEQ ID NO: 51430 - DNA, 50 bp, Artificial Sequence; identical to SEQ ID NO: 813
  Probe

SEQ ID NO: 51431 - DNA, 23 bp, Artificial Sequence
  Probe
ctcacacgcgaaaggtccccggt

SEQ ID NO: 51432 - DNA, 23 bp, Artificial Sequence
  Probe
ctcataatctgaaggtcgtgagt

SEQ ID NO: 51433 - DNA, 16 bp, Artificial Sequence
  Probe
ctgaatccagcgatcc

SEQ ID NO: 51434 - DNA, 17 bp, Artificial Sequence
  Probe
ctgaatccagcgatccg

SEQ ID NO: 51435 - DNA, 20 bp, Artificial Sequence
  Probe
ctgaatccagcgatccgagt

SEQ ID NO: 51436 - DNA, 21 bp, Artificial Sequence
  Probe
ctgaatccagcgatccgagtt

SEQ ID NO: 51437 - DNA, 18 bp, Artificial Sequence
  Probe
ctgccacgcgggaggccc

SEQ ID NO: 51438 - DNA, 22 bp, Artificial Sequence
  Probe
ctgccacgcgggaggcccgggt

SEQ ID NO: 51439 - DNA, 23 bp, Artificial Sequence
  Probe
ctgccacgcgggaggcccgggtt

SEQ ID NO: 51440 - DNA, 19 bp, Artificial Sequence
  Probe
ctgtcacgcgggagaccgg

SEQ ID NO: 51441 - DNA, 20 bp, Artificial Sequence
  Probe
ctgtcacgcgggagaccggg

SEQ ID NO: 51442 - DNA, 22 bp, Artificial Sequence
  Probe
ctgtcacgcgggagaccggggt

SEQ ID NO: 51443 - DNA, 23 bp, Artificial Sequence
  Probe
ctgtcacgcgggagaccggggtt

SEQ ID NO: 51444 - DNA, 18 bp, Artificial Sequence
  Probe
cttccaagcagttgaccc

SEQ ID NO: 51445 - DNA, 23 bp, Artificial Sequence
  Probe
ctttgaatccagcgatccgagtt

SEQ ID NO: 51446 - DNA, 35 bp, Artificial Sequence; identical to SEQ ID NO: 908
  Probe

SEQ ID NO: 51447 - DNA, 18 bp, Artificial Sequence
  Probe
gacctcgtggcgcaatgg

SEQ ID NO: 51448 - DNA, 19 bp, Artificial Sequence
  Probe
gagaaagctcacaagaact

SEQ ID NO: 51449 - DNA, 20 bp, Artificial Sequence
  Probe
gagaaagctcacaagaactg

SEQ ID NO: 51450 - DNA, 22 bp, Artificial Sequence
  Probe
gagaaagctcacaagaactgct

SEQ ID NO: 51451 - DNA, 23 bp, Artificial Sequence
  Probe
gagaaagctcacaagaactgcta

SEQ ID NO: 51452 - DNA, 25 bp, Artificial Sequence
  Probe
gagaaagctcacaagaactgctaac

SEQ ID NO: 51453 - DNA, 26 bp, Artificial Sequence
  Probe
gagaaagctcacaagaactgctaact

SEQ ID NO: 51454 - DNA, 30 bp, Artificial Sequence; identical to SEQ ID NO: 932
  Probe

SEQ ID NO: 51455 - DNA, 32 bp, Artificial Sequence; identical to SEQ ID NO: 934
  Probe

SEQ ID NO: 51456 - DNA, 36 bp, Artificial Sequence; identical to SEQ ID NO: 938
  Probe

SEQ ID NO: 51457 - DNA, 38 bp, Artificial Sequence; identical to SEQ ID NO: 940
  Probe

SEQ ID NO: 51458 - DNA, 40 bp, Artificial Sequence; identical to SEQ ID NO: 942
  Probe

SEQ ID NO: 51459 - DNA, 41 bp, Artificial Sequence; identical to SEQ ID NO: 943
  Probe

SEQ ID NO: 51460 - DNA, 42 bp, Artificial Sequence; identical to SEQ ID NO: 944
  Probe

SEQ ID NO: 51461 - DNA, 45 bp, Artificial Sequence; identical to SEQ ID NO: 947
  Probe

SEQ ID NO: 51462 - DNA, 50 bp, Artificial Sequence; identical to SEQ ID NO: 950
  Probe

SEQ ID NO: 51463 - DNA, 18 bp, Artificial Sequence
  Probe
gagcccggtaatcgcata

SEQ ID NO: 51464 - DNA, 25 bp, Artificial Sequence
  Probe
gagcccggtaatcgcataaaactta

SEQ ID NO: 51465 - DNA, 30 bp, Artificial Sequence; identical to SEQ ID NO: 960
  Probe

SEQ ID NO: 51466 - DNA, 31 bp, Artificial Sequence; identical to SEQ ID NO: 961
  Probe

SEQ ID NO: 51467 - DNA, 35 bp, Artificial Sequence; identical to SEQ ID NO: 5659
  Probe

SEQ ID NO: 51468 - DNA, 39 bp, Artificial Sequence; identical to SEQ ID NO: 963
  Probe

SEQ ID NO: 51469 - DNA, 45 bp, Artificial Sequence; identical to SEQ ID NO: 964
  Probe

SEQ ID NO: 51470 - DNA, 50 bp, Artificial Sequence; identical to SEQ ID NO: 965
  Probe

SEQ ID NO: 51471 - DNA, 50 bp, Artificial Sequence; identical to SEQ ID NO: 973
  Probe

SEQ ID NO: 51472 - DNA, 16 bp, Artificial Sequence
  Probe
gattcccattcttgcg

SEQ ID NO: 51473 - DNA, 17 bp, Artificial Sequence
  Probe
gattcccattcttgcga

SEQ ID NO: 51474 - DNA, 20 bp, Artificial Sequence
  Probe
gattcccattcttgcgaccc

SEQ ID NO: 51475 - DNA, 27 bp, Artificial Sequence
  Probe
gattcggcgctctcaccgccgcggccc

SEQ ID NO: 51476 - DNA, 28 bp, Artificial Sequence
  Probe
gcactctggactctgaatccagcgatcc

SEQ ID NO: 51477 - DNA, 29 bp, Artificial Sequence
  Probe
gcactctggactctgaatccagcgatccg

SEQ ID NO: 51478 - DNA, 28 bp, Artificial Sequence
  Probe
gcactctggactttgaatccagcgatcc

SEQ ID NO: 51479 - DNA, 28 bp, Artificial Sequence
  Probe
gcatagctgccttccaagcagttgaccc

SEQ ID NO: 51480 - DNA, 32 bp, Artificial Sequence; identical to SEQ ID NO: 1004
  Probe

SEQ ID NO: 51481 - DNA, 33 bp, Artificial Sequence; identical to SEQ ID NO: 1005
  Probe

SEQ ID NO: 51482 - DNA, 34 bp, Artificial Sequence; identical to SEQ ID NO: 1006
  Probe

SEQ ID NO: 51483 - DNA, 38 bp, Artificial Sequence; identical to SEQ ID NO: 1009
  Probe

SEQ ID NO: 51484 - DNA, 49 bp, Artificial Sequence; identical to SEQ ID NO: 5876
  Probe

SEQ ID NO: 51485 - DNA, 50 bp, Artificial Sequence; identical to SEQ ID NO: 1010
  Probe

SEQ ID NO: 51486 - DNA, 38 bp, Artificial Sequence; identical to SEQ ID NO: 1014
  Probe

SEQ ID NO: 51487 - DNA, 39 bp, Artificial Sequence; identical to SEQ ID NO: 1015
  Probe

SEQ ID NO: 51488 - DNA, 40 bp, Artificial Sequence; identical to SEQ ID NO: 1016
  Probe

SEQ ID NO: 51489 - DNA, 41 bp, Artificial Sequence; identical to SEQ ID NO: 1017
  Probe

SEQ ID NO: 51490 - DNA, 43 bp, Artificial Sequence; identical to SEQ ID NO: 5914
  Probe

SEQ ID NO: 51491 - DNA, 49 bp, Artificial Sequence; identical to SEQ ID NO: 1019
  Probe

SEQ ID NO: 51492 - DNA, 50 bp, Artificial Sequence; identical to SEQ ID NO: 1020
  Probe

SEQ ID NO: 51493 - DNA, 16 bp, Artificial Sequence
  Probe
gccacgcgggaggccc

SEQ ID NO: 51494 - DNA, 20 bp, Artificial Sequence
  Probe
gccacgcgggaggcccgggt

SEQ ID NO: 51495 - DNA, 21 bp, Artificial Sequence
  Probe
gccacgcgggaggcccgggtt

SEQ ID NO: 51496 - DNA, 22 bp, Artificial Sequence
  Probe
gccacgcgggaggcccgggttt

SEQ ID NO: 51497 - DNA, 35 bp, Artificial Sequence; identical to SEQ ID NO: 20771
  Probe

SEQ ID NO: 51498 - DNA, 50 bp, Artificial Sequence; identical to SEQ ID NO: 40288
  Probe

SEQ ID NO: 51499 - DNA, 18 bp, Artificial Sequence
  Probe
gcccggatagctcagtcg

SEQ ID NO: 51500 - DNA, 19 bp, Artificial Sequence
  Probe
gcccggatagctcagtcgg

SEQ ID NO: 51501 - DNA, 21 bp, Artificial Sequence
  Probe
gcccggatagctcagtcggta

SEQ ID NO: 51502 - DNA, 22 bp, Artificial Sequence
  Probe
gcccggatagctcagtcggtag

SEQ ID NO: 51503 - DNA, 23 bp, Artificial Sequence
  Probe
gcccggatagctcagtcggtaga

SEQ ID NO: 51504 - DNA, 25 bp, Artificial Sequence
  Probe
gcccggatagctcagtcggtagagc

SEQ ID NO: 51505 - DNA, 26 bp, Artificial Sequence
  Probe
gcccggatagctcagtcggtagagca

SEQ ID NO: 51506 - DNA, 27 bp, Artificial Sequence
  Probe
gcccggatagctcagtcggtagagcat

SEQ ID NO: 51507 - DNA, 29 bp, Artificial Sequence
  Probe
gcccggatagctcagtcggtagagcatca

SEQ ID NO: 51508 - DNA, 30 bp, Artificial Sequence; identical to SEQ ID NO: 1038
  Probe

SEQ ID NO: 51509 - DNA, 31 bp, Artificial Sequence; identical to SEQ ID NO: 1039
  Probe

SEQ ID NO: 51510 - DNA, 32 bp, Artificial Sequence; identical to SEQ ID NO: 1040
  Probe

SEQ ID NO: 51511 - DNA, 33 bp, Artificial Sequence; identical to SEQ ID NO: 1041
  Probe

SEQ ID NO: 51512 - DNA, 34 bp, Artificial Sequence; identical to SEQ ID NO: 1042
  Probe

SEQ ID NO: 51513 - DNA, 35 bp, Artificial Sequence; identical to SEQ ID NO: 1043
  Probe

SEQ ID NO: 51514 - DNA, 36 bp, Artificial Sequence; identical to SEQ ID NO: 1044
  Probe

SEQ ID NO: 51515 - DNA, 16 bp, Artificial Sequence
  Probe
gcccggctagctcagt

SEQ ID NO: 51516 - DNA, 17 bp, Artificial Sequence
  Probe
gcccggctagctcagtc

SEQ ID NO: 51517 - DNA, 18 bp, Artificial Sequence
  Probe
gcccggctagctcagtcg

SEQ ID NO: 51518 - DNA, 21 bp, Artificial Sequence
  Probe
gcccggctagctcagtcggta

SEQ ID NO: 51519 - DNA, 22 bp, Artificial Sequence
  Probe
gcccggctagctcagtcggtag

SEQ ID NO: 51520 - DNA, 23 bp, Artificial Sequence
  Probe
gcccggctagctcagtcggtaga

SEQ ID NO: 51521 - DNA, 24 bp, Artificial Sequence
  Probe
gcccggctagctcagtcggtagag

SEQ ID NO: 51522 - DNA, 25 bp, Artificial Sequence
  Probe
gcccggctagctcagtcggtagagc

SEQ ID NO: 51523 - DNA, 26 bp, Artificial Sequence
  Probe
gcccggctagctcagtcggtagagca

SEQ ID NO: 51524 - DNA, 27 bp, Artificial Sequence
  Probe
gcccggctagctcagtcggtagagcat

SEQ ID NO: 51525 - DNA, 28 bp, Artificial Sequence
  Probe
gcccggctagctcagtcggtagagcatg

SEQ ID NO: 51526 - DNA, 29 bp, Artificial Sequence
  Probe
gcccggctagctcagtcggtagagcatga

SEQ ID NO: 51527 - DNA, 30 bp, Artificial Sequence; identical to SEQ ID NO: 1062
  Probe

SEQ ID NO: 51528 - DNA, 31 bp, Artificial Sequence; identical to SEQ ID NO: 1063
  Probe

SEQ ID NO: 51529 - DNA, 32 bp, Artificial Sequence; identical to SEQ ID NO: 1064
  Probe

SEQ ID NO: 51530 - DNA, 33 bp, Artificial Sequence; identical to SEQ ID NO: 1070
  Probe

SEQ ID NO: 51531 - DNA, 34 bp, Artificial Sequence; identical to SEQ ID NO: 1071
  Probe

SEQ ID NO: 51532 - DNA, 36 bp, Artificial Sequence; identical to SEQ ID NO: 1073
  Probe

SEQ ID NO: 51533 - DNA, 40 bp, Artificial Sequence; identical to SEQ ID NO: 1076
  Probe

SEQ ID NO: 51534 - DNA, 42 bp, Artificial Sequence; identical to SEQ ID NO: 1077
  Probe

SEQ ID NO: 51535 - DNA, 50 bp, Artificial Sequence; identical to SEQ ID NO: 1078
  Probe

SEQ ID NO: 51536 - DNA, 29 bp, Artificial Sequence
  Probe
gcccggctagctcagtcggtagagcatgg

SEQ ID NO: 51537 - DNA, 30 bp, Artificial Sequence; identical to SEQ ID NO: 1080
  Probe

SEQ ID NO: 51538 - DNA, 31 bp, Artificial Sequence; identical to SEQ ID NO: 1081
  Probe

SEQ ID NO: 51539 - DNA, 32 bp, Artificial Sequence; identical to SEQ ID NO: 1082
  Probe

SEQ ID NO: 51540 - DNA, 33 bp, Artificial Sequence; identical to SEQ ID NO: 1083
  Probe

SEQ ID NO: 51541 - DNA, 34 bp, Artificial Sequence; identical to SEQ ID NO: 1084
  Probe

SEQ ID NO: 51542 - DNA, 35 bp, Artificial Sequence; identical to SEQ ID NO: 1085
  Probe

SEQ ID NO: 51543 - DNA, 36 bp, Artificial Sequence; identical to SEQ ID NO: 1086
  Probe

SEQ ID NO: 51544 - DNA, 42 bp, Artificial Sequence; identical to SEQ ID NO: 1089
  Probe

SEQ ID NO: 51545 - DNA, 45 bp, Artificial Sequence; identical to SEQ ID NO: 1090
  Probe

SEQ ID NO: 51546 - DNA, 49 bp, Artificial Sequence; identical to SEQ ID NO: 6006
  Probe

SEQ ID NO: 51547 - DNA, 50 bp, Artificial Sequence; identical to SEQ ID NO: 1091
  Probe

SEQ ID NO: 51548 - DNA, 30 bp, Artificial Sequence; identical to SEQ ID NO: 1105
  Probe

SEQ ID NO: 51549 - DNA, 25 bp, Artificial Sequence
  Probe
gcctcctaagccagggattgtgggt

SEQ ID NO: 51550 - DNA, 32 bp, Artificial Sequence; identical to SEQ ID NO: 1112
  Probe

SEQ ID NO: 51551 - DNA, 31 bp, Artificial Sequence; identical to SEQ ID NO: 1115
  Probe

SEQ ID NO: 51552 - DNA, 31 bp, Artificial Sequence; identical to SEQ ID NO: 1126
  Probe

SEQ ID NO: 51553 - DNA, 24 bp, Artificial Sequence
  Probe
gcctgtcacgcgggagaccggggt

SEQ ID NO: 51554 - DNA, 16 bp, Artificial Sequence
  Probe
gcgaaaggtccccggt

SEQ ID NO: 51555 - DNA, 17 bp, Artificial Sequence
  Probe
gcgccgctggtgtagtg

SEQ ID NO: 51556 - DNA, 20 bp, Artificial Sequence
  Probe
gcgccgctggtgtagtggta

SEQ ID NO: 51557 - DNA, 21 bp, Artificial Sequence
  Probe
gcgccgctggtgtagtggtat

SEQ ID NO: 51558 - DNA, 22 bp, Artificial Sequence
  Probe
gcgccgctggtgtagtggtatc

SEQ ID NO: 51559 - DNA, 23 bp, Artificial Sequence
  Probe
gcgccgctggtgtagtggtatca

SEQ ID NO: 51560 - DNA, 25 bp, Artificial Sequence
  Probe
gcgccgctggtgtagtggtatcatg

SEQ ID NO: 51561 - DNA, 26 bp, Artificial Sequence
  Probe
gcgccgctggtgtagtggtatcatgc

SEQ ID NO: 51562 - DNA, 27 bp, Artificial Sequence
  Probe
gcgccgctggtgtagtggtatcatgca

SEQ ID NO: 51563 - DNA, 28 bp, Artificial Sequence
  Probe
gcgccgctggtgtagtggtatcatgcaa

SEQ ID NO: 51564 - DNA, 29 bp, Artificial Sequence
  Probe
gcgccgctggtgtagtggtatcatgcaag

SEQ ID NO: 51565 - DNA, 30 bp, Artificial Sequence; identical to SEQ ID NO: 1149
  Probe

SEQ ID NO: 51566 - DNA, 31 bp, Artificial Sequence; identical to SEQ ID NO: 1150
  Probe

SEQ ID NO: 51567 - DNA, 32 bp, Artificial Sequence; identical to SEQ ID NO: 1151
  Probe

SEQ ID NO: 51568 - DNA, 33 bp, Artificial Sequence; identical to SEQ ID NO: 1152
  Probe

SEQ ID NO: 51569 - DNA, 34 bp, Artificial Sequence; identical to SEQ ID NO: 1153
  Probe

SEQ ID NO: 51570 - DNA, 35 bp, Artificial Sequence; identical to SEQ ID NO: 1154
  Probe

SEQ ID NO: 51571 - DNA, 36 bp, Artificial Sequence; identical to SEQ ID NO: 1155
  Probe

SEQ ID NO: 51572 - DNA, 37 bp, Artificial Sequence; identical to SEQ ID NO: 1156
  Probe

SEQ ID NO: 51573 - DNA, 39 bp, Artificial Sequence; identical to SEQ ID NO: 1157
  Probe

SEQ ID NO: 51574 - DNA, 40 bp, Artificial Sequence; identical to SEQ ID NO: 1158
  Probe

SEQ ID NO: 51575 - DNA, 41 bp, Artificial Sequence; identical to SEQ ID NO: 1159
  Probe

SEQ ID NO: 51576 - DNA, 44 bp, Artificial Sequence; identical to SEQ ID NO: 6092
  Probe

SEQ ID NO: 51577 - DNA, 45 bp, Artificial Sequence; identical to SEQ ID NO: 6093
  Probe

SEQ ID NO: 51578 - DNA, 46 bp, Artificial Sequence; identical to SEQ ID NO: 1160
  Probe

SEQ ID NO: 51579 - DNA, 49 bp, Artificial Sequence; identical to SEQ ID NO: 6096
  Probe

SEQ ID NO: 51580 - DNA, 50 bp, Artificial Sequence; identical to SEQ ID NO: 1161
  Probe

SEQ ID NO: 51581 - DNA, 21 bp, Artificial Sequence
  Probe
gcgctctcaccgccgcggccc

SEQ ID NO: 51582 - DNA, 35 bp, Artificial Sequence; identical to SEQ ID NO: 1188
  Probe

SEQ ID NO: 51583 - DNA, 44 bp, Artificial Sequence; identical to SEQ ID NO: 1191
  Probe

SEQ ID NO: 51584 - DNA, 50 bp, Artificial Sequence; identical to SEQ ID NO: 1192
  Probe

SEQ ID NO: 51585 - DNA, 44 bp, Artificial Sequence; identical to SEQ ID NO: 1194
  Probe

SEQ ID NO: 51586 - DNA, 50 bp, Artificial Sequence; identical to SEQ ID NO: 1195
  Probe

SEQ ID NO: 51587 - DNA, 44 bp, Artificial Sequence; identical to SEQ ID NO: 1196
  Probe

SEQ ID NO: 51588 - DNA, 50 bp, Artificial Sequence; identical to SEQ ID NO: 1197
  Probe

SEQ ID NO: 51589 - DNA, 26 bp, Artificial Sequence
  Probe
gctagctcagtcggtagagcatggga

SEQ ID NO: 51590 - DNA, 27 bp, Artificial Sequence
  Probe
gctagctcagtcggtagagcatgggac

SEQ ID NO: 51591 - DNA, 28 bp, Artificial Sequence
  Probe
gctagctcagtcggtagagcatgggact

SEQ ID NO: 51592 - DNA, 19 bp, Artificial Sequence
  Probe
gctctcaccgccgcggccc

SEQ ID NO: 51593 - DNA, 37 bp, Artificial Sequence; identical to SEQ ID NO: 6324
  Probe

SEQ ID NO: 51594 - DNA, 39 bp, Artificial Sequence; identical to SEQ ID NO: 21333
  Probe

SEQ ID NO: 51595 - DNA, 40 bp, Artificial Sequence
  Probe
gcttctgtagtgtagtggttatcacgttcgcctcacacgc

SEQ ID NO: 51596 - DNA, 41 bp, Artificial Sequence
  Probe
gcttctgtagtgtagtggttatcacgttcgcctcacacgcg

SEQ ID NO: 51597 - DNA, 50 bp, Artificial Sequence; identical to SEQ ID NO: 1219
  Probe

SEQ ID NO: 51598 - DNA, 27 bp, Artificial Sequence
  Probe
ggatagctcagtcggtagagcatcaga

SEQ ID NO: 51599 - DNA, 28 bp, Artificial Sequence
  Probe
ggattcctggttttcacccaggcggccc

SEQ ID NO: 51600 - DNA, 28 bp, Artificial Sequence
  Probe
ggattcctggttttcacccaggtggccc

SEQ ID NO: 51601 - DNA, 16 bp, Artificial Sequence
  Probe
ggattcggcgctctca

SEQ ID NO: 51602 - DNA, 23 bp, Artificial Sequence
  Probe
ggattcggcgctctcaccgccgc

SEQ ID NO: 51603 - DNA, 24 bp, Artificial Sequence
  Probe
ggattcggcgctctcaccgccgcg

SEQ ID NO: 51604 - DNA, 25 bp, Artificial Sequence
  Probe
ggattcggcgctctcaccgccgcgg

SEQ ID NO: 51605 - DNA, 27 bp, Artificial Sequence
  Probe
ggattcggcgctctcaccgccgcggcc

SEQ ID NO: 51606 - DNA, 28 bp, Artificial Sequence
  Probe
ggattcggcgctctcaccgccgcggccc

SEQ ID NO: 51607 - DNA, 29 bp, Artificial Sequence
  Probe
ggattcggcgctctcaccgccgcggcccg

SEQ ID NO: 51608 - DNA, 27 bp, Artificial Sequence
  Probe
ggctagctcagtcggtagagcatgaga

SEQ ID NO: 51609 - DNA, 28 bp, Artificial Sequence
  Probe
ggctagctcagtcggtagagcatgagac

SEQ ID NO: 51610 - DNA, 27 bp, Artificial Sequence
  Probe
ggctagctcagtcggtagagcatggga

SEQ ID NO: 51611 - DNA, 28 bp, Artificial Sequence
  Probe
ggctagctcagtcggtagagcatgggac

SEQ ID NO: 51612 - DNA, 29 bp, Artificial Sequence
  Probe
ggctagctcagtcggtagagcatgggact

SEQ ID NO: 51613 - DNA, 30 bp, Artificial Sequence; identical to SEQ ID NO: 1292
  Probe

SEQ ID NO: 51614 - DNA, 28 bp, Artificial Sequence
  Probe
ggctccgtggcgcaatggatagcgcatt

SEQ ID NO: 51615 - DNA, 30 bp, Artificial Sequence; identical to SEQ ID NO: 10704
  Probe

SEQ ID NO: 51616 - DNA, 30 bp, Artificial Sequence; identical to SEQ ID NO: 1335
  Probe

SEQ ID NO: 51617 - DNA, 30 bp, Artificial Sequence; identical to SEQ ID NO: 1367
  Probe

SEQ ID NO: 51618 - DNA, 17 bp, Artificial Sequence
  Probe
ggggtatgattctcggt

SEQ ID NO: 51619 - DNA, 16 bp, Artificial Sequence
  Probe
gggtatgattctcggt

SEQ ID NO: 51620 - DNA, 16 bp, Artificial Sequence
  Probe
gggtgcgagaggtccc

SEQ ID NO: 51621 - DNA, 32 bp, Artificial Sequence; identical to SEQ ID NO: 6703
  Probe

SEQ ID NO: 51622 - DNA, 25 bp, Artificial Sequence
  Probe
ggtagagcatgggactcttaatccc

SEQ ID NO: 51623 - DNA, 22 bp, Artificial Sequence
  Probe
ggtagcgtggccgagcggtcta

SEQ ID NO: 51624 - DNA, 32 bp, Artificial Sequence; identical to SEQ ID NO: 13915
  Probe

SEQ ID NO: 51625 - DNA, 33 bp, Artificial Sequence; identical to SEQ ID NO: 22104
  Probe

SEQ ID NO: 51626 - DNA, 33 bp, Artificial Sequence; identical to SEQ ID NO: 1407
  Probe

SEQ ID NO: 51627 - DNA, 50 bp, Artificial Sequence; identical to SEQ ID NO: 1417
  Probe

SEQ ID NO: 51628 - DNA, 33 bp, Artificial Sequence; identical to SEQ ID NO: 13931
  Probe

SEQ ID NO: 51629 - DNA, 34 bp, Artificial Sequence; identical to SEQ ID NO: 13935
  Probe

SEQ ID NO: 51630 - DNA, 21 bp, Artificial Sequence
  Probe
ggttaggattcggcgctctca

SEQ ID NO: 51631 - DNA, 33 bp, Artificial Sequence; identical to SEQ ID NO: 22258
  Probe

SEQ ID NO: 51632 - DNA, 31 bp, Artificial Sequence; identical to SEQ ID NO: 13956
  Probe

SEQ ID NO: 51633 - DNA, 23 bp, Artificial Sequence
  Probe
ggttccatagtgtagtggttatc

SEQ ID NO: 51634 - DNA, 28 bp, Artificial Sequence
  Probe
ggttccatagtgtagtggttatcacgtc

SEQ ID NO: 51635 - DNA, 31 bp, Artificial Sequence; identical to SEQ ID NO: 1452
  Probe

SEQ ID NO: 51636 - DNA, 50 bp, Artificial Sequence; identical to SEQ ID NO: 1457
  Probe

SEQ ID NO: 51637 - DNA, 18 bp, Artificial Sequence
  Probe
gtaaaccaggggtcgcga

SEQ ID NO: 51638 - DNA, 36 bp, Artificial Sequence; identical to SEQ ID NO: 14013
  Probe

SEQ ID NO: 51639 - DNA, 32 bp, Artificial Sequence; identical to SEQ ID NO: 1473
  Probe

SEQ ID NO: 51640 - DNA, 17 bp, Artificial Sequence
  Probe
gtccttgtagtataaac

SEQ ID NO: 51641 - DNA, 18 bp, Artificial Sequence
  Probe
gtccttgtagtataaact

SEQ ID NO: 51642 - DNA, 19 bp, Artificial Sequence
  Probe
gtccttgtagtataaacta

SEQ ID NO: 51643 - DNA, 29 bp, Artificial Sequence
  Probe
gtccttgtagtataaactaatacaccagt

SEQ ID NO: 51644 - DNA, 17 bp, Artificial Sequence
  Probe
gtcggtagagcatcaga

SEQ ID NO: 51645 - DNA, 17 bp, Artificial Sequence
  Probe
gtcggtagagcatggga

SEQ ID NO: 51646 - DNA, 18 bp, Artificial Sequence
  Probe
gtcggtagagcatgggac

SEQ ID NO: 51647 - DNA, 23 bp, Artificial Sequence
  Probe
gtctcataatctgaaggtcgtga

SEQ ID NO: 51648 - DNA, 25 bp, Artificial Sequence
  Probe
gtctcataatctgaaggtcgtgagt

SEQ ID NO: 51649 - DNA, 32 bp, Artificial Sequence; identical to SEQ ID NO: 14072
  Probe

SEQ ID NO: 51650 - DNA, 19 bp, Artificial Sequence
  Probe
gtgagtatccccgcctgtc

SEQ ID NO: 51651 - DNA, 33 bp, Artificial Sequence; identical to SEQ ID NO: 14079
  Probe

SEQ ID NO: 51652 - DNA, 17 bp, Artificial Sequence
  Probe
gtggttaggattcggcg

SEQ ID NO: 51653 - DNA, 18 bp, Artificial Sequence
  Probe
gtggttaggattcggcgc

SEQ ID NO: 51654 - DNA, 19 bp, Artificial Sequence
  Probe
gtggttaggattcggcgct

SEQ ID NO: 51655 - DNA, 23 bp, Artificial Sequence
  Probe
gtggttaggattcggcgctctca

SEQ ID NO: 51656 - DNA, 30 bp, Artificial Sequence; identical to SEQ ID NO: 22854
  Probe

SEQ ID NO: 51657 - DNA, 35 bp, Artificial Sequence; identical to SEQ ID NO: 14107
  Probe

SEQ ID NO: 51658 - DNA, 38 bp, Artificial Sequence; identical to SEQ ID NO: 22935
  Probe

SEQ ID NO: 51659 - DNA, 30 bp, Artificial Sequence; identical to SEQ ID NO: 1521
  Probe

SEQ ID NO: 51660 - DNA, 37 bp, Artificial Sequence; identical to SEQ ID NO: 1523
  Probe

SEQ ID NO: 51661 - DNA, 34 bp, Artificial Sequence; identical to SEQ ID NO: 1538
  Probe

SEQ ID NO: 51662 - DNA, 28 bp, Artificial Sequence
  Probe
gtttccgtagtgtagcggttatcacatt

SEQ ID NO: 51663 - DNA, 28 bp, Artificial Sequence
  Probe
gtttccgtagtgtagtggtcatcacgtt

SEQ ID NO: 51664 - DNA, 31 bp, Artificial Sequence; identical to SEQ ID NO: 1559
  Probe

SEQ ID NO: 51665 - DNA, 32 bp, Artificial Sequence; identical to SEQ ID NO: 1560
  Probe

SEQ ID NO: 51666 - DNA, 44 bp, Artificial Sequence
  Probe
gtttccgtagtgtagtggttatcacgttcgcctcacacgcgaaa

SEQ ID NO: 51667 - DNA, 50 bp, Artificial Sequence; identical to SEQ ID NO: 1564
  Probe

SEQ ID NO: 51668 - DNA, 50 bp, Artificial Sequence; identical to SEQ ID NO: 1569
  Probe

SEQ ID NO: 51669 - DNA, 18 bp, Artificial Sequence
  Probe
tacctcctcaaagcaata

SEQ ID NO: 51670 - DNA, 37 bp, Artificial Sequence; identical to SEQ ID NO: 23457
  Probe

SEQ ID NO: 51671 - DNA, 24 bp, Artificial Sequence
  Probe
tagctcagtcggtagagcatggga

SEQ ID NO: 51672 - DNA, 18 bp, Artificial Sequence
  Probe
taggggtatgattctcgg

SEQ ID NO: 51673 - DNA, 19 bp, Artificial Sequence
  Probe
taggggtatgattctcggt

SEQ ID NO: 51674 - DNA, 24 bp, Artificial Sequence
  Probe
tagtggtgagtatccccgcctgtc

SEQ ID NO: 51675 - DNA, 19 bp, Artificial Sequence
  Probe
tagtggttaggattcggcg

SEQ ID NO: 51676 - DNA, 20 bp, Artificial Sequence
  Probe
tagtggttaggattcggcgc

SEQ ID NO: 51677 - DNA, 21 bp, Artificial Sequence
  Probe
tagtggttaggattcggcgct

SEQ ID NO: 51678 - DNA, 25 bp, Artificial Sequence
  Probe
tagtggttaggattcggcgctctca

SEQ ID NO: 51679 - DNA, 26 bp, Artificial Sequence
  Probe
tagtggttaggattcggcgctctcac

SEQ ID NO: 51680 - DNA, 30 bp, Artificial Sequence; identical to SEQ ID NO: 23547
  Probe

SEQ ID NO: 51681 - DNA, 32 bp, Artificial Sequence; identical to SEQ ID NO: 23548
  Probe

SEQ ID NO: 51682 - DNA, 36 bp, Artificial Sequence; identical to SEQ ID NO: 23550
  Probe

SEQ ID NO: 51683 - DNA, 37 bp, Artificial Sequence; identical to SEQ ID NO: 14220
  Probe

SEQ ID NO: 51684 - DNA, 38 bp, Artificial Sequence; identical to SEQ ID NO: 14221
  Probe

SEQ ID NO: 51685 - DNA, 19 bp, Artificial Sequence
  Probe
tagtggttagtactctgcg

SEQ ID NO: 51686 - DNA, 18 bp, Artificial Sequence
  Probe
tagtggttagtatccccg

SEQ ID NO: 51687 - DNA, 19 bp, Artificial Sequence
  Probe
tagtggttagtatccccgc

SEQ ID NO: 51688 - DNA, 22 bp, Artificial Sequence
  Probe
tcaatccccggcacctccacca

SEQ ID NO: 51689 - DNA, 50 bp, Artificial Sequence; identical to SEQ ID NO: 1610
  Probe

SEQ ID NO: 51690 - DNA, 18 bp, Artificial Sequence
  Probe
tcacacgcgaaaggtccc

SEQ ID NO: 51691 - DNA, 22 bp, Artificial Sequence
  Probe
tcacacgcgaaaggtccccggt

SEQ ID NO: 51692 - DNA, 16 bp, Artificial Sequence
  Probe
tccagcgatccgagtt

SEQ ID NO: 51693 - DNA, 22 bp, Artificial Sequence
  Probe
tcccacatggtctagcggttag

SEQ ID NO: 51694 - DNA, 23 bp, Artificial Sequence
  Probe
tcccacatggtctagcggttagg

SEQ ID NO: 51695 - DNA, 24 bp, Artificial Sequence
  Probe
tcccacatggtctagcggttagga

SEQ ID NO: 51696 - DNA, 25 bp, Artificial Sequence
  Probe
tcccacatggtctagcggttaggat

SEQ ID NO: 51697 - DNA, 26 bp, Artificial Sequence
  Probe
tcccacatggtctagcggttaggatt

SEQ ID NO: 51698 - DNA, 27 bp, Artificial Sequence
  Probe
tcccacatggtctagcggttaggattc

SEQ ID NO: 51699 - DNA, 28 bp, Artificial Sequence
  Probe
tcccacatggtctagcggttaggattcc

SEQ ID NO: 51700 - DNA, 29 bp, Artificial Sequence
  Probe
tcccacatggtctagcggttaggattcct

SEQ ID NO: 51701 - DNA, 30 bp, Artificial Sequence; identical to SEQ ID NO: 1643
  Probe

SEQ ID NO: 51702 - DNA, 31 bp, Artificial Sequence; identical to SEQ ID NO: 1644
  Probe

SEQ ID NO: 51703 - DNA, 33 bp, Artificial Sequence; identical to SEQ ID NO: 1646
  Probe

SEQ ID NO: 51704 - DNA, 34 bp, Artificial Sequence; identical to SEQ ID NO: 1647
  Probe

SEQ ID NO: 51705 - DNA, 35 bp, Artificial Sequence; identical to SEQ ID NO: 1648
  Probe

SEQ ID NO: 51706 - DNA, 40 bp, Artificial Sequence; identical to SEQ ID NO: 1651
  Probe

SEQ ID NO: 51707 - DNA, 41 bp, Artificial Sequence; identical to SEQ ID NO: 7796
  Probe

SEQ ID NO: 51708 - DNA, 25 bp, Artificial Sequence
  Probe
tcccatatggtctagcggttaggat

SEQ ID NO: 51709 - DNA, 26 bp, Artificial Sequence
  Probe
tcccatatggtctagcggttaggatt

SEQ ID NO: 51710 - DNA, 27 bp, Artificial Sequence
  Probe
tcccatatggtctagcggttaggattc

SEQ ID NO: 51711 - DNA, 28 bp, Artificial Sequence
  Probe
tcccatatggtctagcggttaggattcc

SEQ ID NO: 51712 - DNA, 29 bp, Artificial Sequence
  Probe
tcccatatggtctagcggttaggattcct

SEQ ID NO: 51713 - DNA, 33 bp, Artificial Sequence; identical to SEQ ID NO: 1662
  Probe

SEQ ID NO: 51714 - DNA, 17 bp, Artificial Sequence
  Probe
tccccggcacctccacc

SEQ ID NO: 51715 - DNA, 18 bp, Artificial Sequence
  Probe
tccccggcacctccacca

SEQ ID NO: 51716 - DNA, 31 bp, Artificial Sequence; identical to SEQ ID NO: 1679
  Probe

SEQ ID NO: 51717 - DNA, 32 bp, Artificial Sequence; identical to SEQ ID NO: 1680
  Probe

SEQ ID NO: 51718 - DNA, 33 bp, Artificial Sequence; identical to SEQ ID NO: 1681
  Probe

SEQ ID NO: 51719 - DNA, 34 bp, Artificial Sequence; identical to SEQ ID NO: 1682
  Probe

SEQ ID NO: 51720 - DNA, 35 bp, Artificial Sequence; identical to SEQ ID NO: 1683
  Probe

SEQ ID NO: 51721 - DNA, 36 bp, Artificial Sequence; identical to SEQ ID NO: 1684
  Probe

SEQ ID NO: 51722 - DNA, 37 bp, Artificial Sequence; identical to SEQ ID NO: 1685
  Probe

SEQ ID NO: 51723 - DNA, 38 bp, Artificial Sequence; identical to SEQ ID NO: 1686
  Probe

SEQ ID NO: 51724 - DNA, 39 bp, Artificial Sequence; identical to SEQ ID NO: 1687
  Probe

SEQ ID NO: 51725 - DNA, 42 bp, Artificial Sequence; identical to SEQ ID NO: 1689
  Probe

SEQ ID NO: 51726 - DNA, 50 bp, Artificial Sequence; identical to SEQ ID NO: 1691
  Probe

SEQ ID NO: 51727 - DNA, 22 bp, Artificial Sequence
  Probe
tcctaagccagggattgtgggt

SEQ ID NO: 51728 - DNA, 22 bp, Artificial Sequence
  Probe
tcctcgttagtatagtggtgag

SEQ ID NO: 51729 - DNA, 23 bp, Artificial Sequence
  Probe
tcctcgttagtatagtggtgagt

SEQ ID NO: 51730 - DNA, 24 bp, Artificial Sequence
  Probe
tcctcgttagtatagtggtgagta

SEQ ID NO: 51731 - DNA, 25 bp, Artificial Sequence
  Probe
tcctcgttagtatagtggtgagtat

SEQ ID NO: 51732 - DNA, 26 bp, Artificial Sequence
  Probe
tcctcgttagtatagtggtgagtatc

SEQ ID NO: 51733 - DNA, 27 bp, Artificial Sequence
  Probe
tcctcgttagtatagtggtgagtatcc

SEQ ID NO: 51734 - DNA, 28 bp, Artificial Sequence
  Probe
tcctcgttagtatagtggtgagtatccc

SEQ ID NO: 51735 - DNA, 29 bp, Artificial Sequence
  Probe
tcctcgttagtatagtggtgagtatcccc

SEQ ID NO: 51736 - DNA, 30 bp, Artificial Sequence; identical to SEQ ID NO: 1701
  Probe

SEQ ID NO: 51737 - DNA, 31 bp, Artificial Sequence; identical to SEQ ID NO: 1702
  Probe

SEQ ID NO: 51738 - DNA, 32 bp, Artificial Sequence; identical to SEQ ID NO: 1703
  Probe

SEQ ID NO: 51739 - DNA, 33 bp, Artificial Sequence; identical to SEQ ID NO: 1704
  Probe

SEQ ID NO: 51740 - DNA, 34 bp, Artificial Sequence; identical to SEQ ID NO: 1705
  Probe

SEQ ID NO: 51741 - DNA, 35 bp, Artificial Sequence; identical to SEQ ID NO: 1706
  Probe

SEQ ID NO: 51742 - DNA, 36 bp, Artificial Sequence; identical to SEQ ID NO: 1707
  Probe

SEQ ID NO: 51743 - DNA, 50 bp, Artificial Sequence; identical to SEQ ID NO: 1711
  Probe

SEQ ID NO: 51744 - DNA, 18 bp, Artificial Sequence
  Probe
tcgggtgcgagaggtccc

SEQ ID NO: 51745 - DNA, 22 bp, Artificial Sequence
  Probe
tcgggtgcgagaggtcccgggt

SEQ ID NO: 51746 - DNA, 23 bp, Artificial Sequence
  Probe
tcgggtgcgagaggtcccgggtt

SEQ ID NO: 51747 - DNA, 16 bp, Artificial Sequence
  Probe
tcggtagagcatcaga

SEQ ID NO: 51748 - DNA, 16 bp, Artificial Sequence
  Probe
tcggtagagcatggga

SEQ ID NO: 51749 - DNA, 17 bp, Artificial Sequence
  Probe
tcggtagagcatgggac

SEQ ID NO: 51750 - DNA, 22 bp, Artificial Sequence
  Probe
tcgtaaaccgaagatcacgggt

SEQ ID NO: 51751 - DNA, 22 bp, Artificial Sequence
  Probe
tcgtaaaccgaagatcgcgggt

SEQ ID NO: 51752 - DNA, 39 bp, Artificial Sequence; identical to SEQ ID NO: 24131
  Probe

SEQ ID NO: 51753 - DNA, 24 bp, Artificial Sequence
  Probe
tctcataatctgaaggtcgtgagt

SEQ ID NO: 51754 - DNA, 20 bp, Artificial Sequence
  Probe
tgaatccagcgatccgagtt

SEQ ID NO: 51755 - DNA, 32 bp, Artificial Sequence; identical to SEQ ID NO: 1736
  Probe

SEQ ID NO: 51756 - DNA, 36 bp, Artificial Sequence; identical to SEQ ID NO: 1740
  Probe

SEQ ID NO: 51757 - DNA, 38 bp, Artificial Sequence; identical to SEQ ID NO: 1742
  Probe

SEQ ID NO: 51758 - DNA, 32 bp, Artificial Sequence
  Probe
tgagcatagctgccttccaagcagttgacccg

SEQ ID NO: 51759 - DNA, 21 bp, Artificial Sequence
  Probe
tgccacgcgggaggcccgggt

SEQ ID NO: 51760 - DNA, 22 bp, Artificial Sequence
  Probe
tgccacgcgggaggcccgggtt

SEQ ID NO: 51761 - DNA, 23 bp, Artificial Sequence
  Probe
tggtagaattctcgcctgccacg

SEQ ID NO: 51762 - DNA, 24 bp, Artificial Sequence
  Probe
tggtagaattctcgcctgccacgc

SEQ ID NO: 51763 - DNA, 33 bp, Artificial Sequence; identical to SEQ ID NO: 1768
  Probe

SEQ ID NO: 51764 - DNA, 33 bp, Artificial Sequence; identical to SEQ ID NO: 24393
  Probe

SEQ ID NO: 51765 - DNA, 24 bp, Artificial Sequence
  Probe
tggtctagcggttaggattcctgg

SEQ ID NO: 51766 - DNA, 42 bp, Artificial Sequence; identical to SEQ ID NO: 24412
  Probe

SEQ ID NO: 51767 - DNA, 21 bp, Artificial Sequence
  Probe
tggtgagtatccccgcctgtc

SEQ ID NO: 51768 - DNA, 23 bp, Artificial Sequence
  Probe
tggtgagtatccccgcctgtcac

SEQ ID NO: 51769 - DNA, 24 bp, Artificial Sequence
  Probe
tggtgagtatccccgcctgtcacg

SEQ ID NO: 51770 - DNA, 35 bp, Artificial Sequence; identical to SEQ ID NO: 14415
  Probe

SEQ ID NO: 51771 - DNA, 23 bp, Artificial Sequence
  Probe
tggtgtagtggtatcatgcaaga

SEQ ID NO: 51772 - DNA, 41 bp, Artificial Sequence; identical to SEQ ID NO: 14425
  Probe

SEQ ID NO: 51773 - DNA, 16 bp, Artificial Sequence
  Probe
tggttaggattcggcg

SEQ ID NO: 51774 - DNA, 17 bp, Artificial Sequence
  Probe
tggttaggattcggcgc

SEQ ID NO: 51775 - DNA, 18 bp, Artificial Sequence
  Probe
tggttaggattcggcgct

SEQ ID NO: 51776 - DNA, 19 bp, Artificial Sequence
  Probe
tggttaggattcggcgctc

SEQ ID NO: 51777 - DNA, 20 bp, Artificial Sequence
  Probe
tggttaggattcggcgctct

SEQ ID NO: 51778 - DNA, 22 bp, Artificial Sequence
  Probe
tggttaggattcggcgctctca

SEQ ID NO: 51779 - DNA, 23 bp, Artificial Sequence
  Probe
tggttaggattcggcgctctcac

SEQ ID NO: 51780 - DNA, 24 bp, Artificial Sequence
  Probe
tggttaggattcggcgctctcacc

SEQ ID NO: 51781 - DNA, 27 bp, Artificial Sequence
  Probe
tggttaggattcggcgctctcaccgcc

SEQ ID NO: 51782 - DNA, 29 bp, Artificial Sequence
  Probe
tggttaggattcggcgctctcaccgccgc

SEQ ID NO: 51783 - DNA, 33 bp, Artificial Sequence; identical to SEQ ID NO: 24446
  Probe

SEQ ID NO: 51784 - DNA, 34 bp, Artificial Sequence; identical to SEQ ID NO: 14437
  Probe

SEQ ID NO: 51785 - DNA, 35 bp, Artificial Sequence; identical to SEQ ID NO: 24447
  Probe

SEQ ID NO: 51786 - DNA, 17 bp, Artificial Sequence
  Probe
tggttagtactctgcgt

SEQ ID NO: 51787 - DNA, 16 bp, Artificial Sequence
  Probe
tggttagtatccccgc

SEQ ID NO: 51788 - DNA, 21 bp, Artificial Sequence
  Probe
tgtcacgcgggagaccggggt

SEQ ID NO: 51789 - DNA, 37 bp, Artificial Sequence; identical to SEQ ID NO: 1786
  Probe

SEQ ID NO: 51790 - DNA, 16 bp, Artificial Sequence
  Probe
ttcccattcttgcgac

SEQ ID NO: 51791 - DNA, 17 bp, Artificial Sequence
  Probe
ttcccattcttgcgacc

SEQ ID NO: 51792 - DNA, 18 bp, Artificial Sequence
  Probe
ttcccattcttgcgaccc

SEQ ID NO: 51793 - DNA, 23 bp, Artificial Sequence
  Probe
ttccccgcacaggttcgaatcct

SEQ ID NO: 51794 - DNA, 50 bp, Artificial Sequence; identical to SEQ ID NO: 4
  Probe

SEQ ID NO: 51795 - DNA, 23 bp, Artificial Sequence
  Probe
aaaacctttttccaaggacaaat

SEQ ID NO: 51796 - DNA, 32 bp, Artificial Sequence; identical to SEQ ID NO: 14485
  Probe

SEQ ID NO: 51797 - DNA, 50 bp, Artificial Sequence; identical to SEQ ID NO: 1818
  Probe

SEQ ID NO: 51798 - DNA, 39 bp, Artificial Sequence; identical to SEQ ID NO: 6
  Probe

SEQ ID NO: 51799 - DNA, 40 bp, Artificial Sequence; identical to SEQ ID NO: 7
  Probe

SEQ ID NO: 51800 - DNA, 41 bp, Artificial Sequence; identical to SEQ ID NO: 1823
  Probe

SEQ ID NO: 51801 - DNA, 42 bp, Artificial Sequence; identical to SEQ ID NO: 1824
  Probe

SEQ ID NO: 51802 - DNA, 43 bp, Artificial Sequence; identical to SEQ ID NO: 1825
  Probe

SEQ ID NO: 51803 - DNA, 44 bp, Artificial Sequence; identical to SEQ ID NO: 1826
  Probe

SEQ ID NO: 51804 - DNA, 45 bp, Artificial Sequence; identical to SEQ ID NO: 1827
  Probe

SEQ ID NO: 51805 - DNA, 46 bp, Artificial Sequence; identical to SEQ ID NO: 1828
  Probe

SEQ ID NO: 51806 - DNA, 50 bp, Artificial Sequence; identical to SEQ ID NO: 1830
  Probe

SEQ ID NO: 51807 - DNA, 38 bp, Artificial Sequence; identical to SEQ ID NO: 1833
  Probe

SEQ ID NO: 51808 - DNA, 46 bp, Artificial Sequence
  Probe
aaaagagttactttgatagagtaaataataggagcttaaaccccct

SEQ ID NO: 51809 - DNA, 50 bp, Artificial Sequence; identical to SEQ ID NO: 1838
  Probe

SEQ ID NO: 51810 - DNA, 24 bp, Artificial Sequence
  Probe
aaaattttggtgcaactccaaata

SEQ ID NO: 51811 - DNA, 50 bp, Artificial Sequence; identical to SEQ ID NO: 1846
  Probe

SEQ ID NO: 51812 - DNA, 50 bp, Artificial Sequence; identical to SEQ ID NO: 14
  Probe

SEQ ID NO: 51813 - DNA, 25 bp, Artificial Sequence
  Probe
aaaccatttcataactttgtcaaag

SEQ ID NO: 51814 - DNA, 26 bp, Artificial Sequence
  Probe
aaaccatttcataactttgtcaaagt

SEQ ID NO: 51815 - DNA, 50 bp, Artificial Sequence; identical to SEQ ID NO: 1871
  Probe

SEQ ID NO: 51816 - DNA, 15 bp, Artificial Sequence
  Probe
aaacccactccacct

SEQ ID NO: 51817 - DNA, 35 bp, Artificial Sequence; identical to SEQ ID NO: 1876
  Probe

SEQ ID NO: 51818 - DNA, 19 bp, Artificial Sequence
  Probe
aaaccgggcggaaacacct

SEQ ID NO: 51819 - DNA, 20 bp, Artificial Sequence
  Probe
aaaccgggcggaaacacctc

SEQ ID NO: 51820 - DNA, 21 bp, Artificial Sequence
  Probe
aaaccgggcggaaacacctcc

SEQ ID NO: 51821 - DNA, 20 bp, Artificial Sequence
  Probe
aaaccgggcggaaacacgtt

SEQ ID NO: 51822 - DNA, 21 bp, Artificial Sequence
  Probe
aaaccgggcggaaacacgttt

SEQ ID NO: 51823 - DNA, 19 bp, Artificial Sequence
  Probe
aaaccgggcggaaacaggt

SEQ ID NO: 51824 - DNA, 20 bp, Artificial Sequence
  Probe
aaaccgggcggaaacaggta

SEQ ID NO: 51825 - DNA, 21 bp, Artificial Sequence
  Probe
aaaccgggcggaaacaggtag

SEQ ID NO: 51826 - DNA, 22 bp, Artificial Sequence
  Probe
aaaccgggcggaaacaggtagg

SEQ ID NO: 51827 - DNA, 27 bp, Artificial Sequence
  Probe
aaacctagccccaaacccactccacct

SEQ ID NO: 51828 - DNA, 49 bp, Artificial Sequence; identical to SEQ ID NO: 1884
  Probe

SEQ ID NO: 51829 - DNA, 50 bp, Artificial Sequence; identical to SEQ ID NO: 1885
  Probe

SEQ ID NO: 51830 - DNA, 39 bp, Artificial Sequence; identical to SEQ ID NO: 16
  Probe

SEQ ID NO: 51831 - DNA, 40 bp, Artificial Sequence; identical to SEQ ID NO: 1886
  Probe

SEQ ID NO: 51832 - DNA, 41 bp, Artificial Sequence; identical to SEQ ID NO: 1887
  Probe

SEQ ID NO: 51833 - DNA, 44 bp, Artificial Sequence; identical to SEQ ID NO: 1888
  Probe

SEQ ID NO: 51834 - DNA, 50 bp, Artificial Sequence; identical to SEQ ID NO: 1890
  Probe

SEQ ID NO: 51835 - DNA, 38 bp, Artificial Sequence; identical to SEQ ID NO: 1895
  Probe

SEQ ID NO: 51836 - DNA, 39 bp, Artificial Sequence; identical to SEQ ID NO: 1896
  Probe

SEQ ID NO: 51837 - DNA, 40 bp, Artificial Sequence; identical to SEQ ID NO: 1897
  Probe

SEQ ID NO: 51838 - DNA, 41 bp, Artificial Sequence; identical to SEQ ID NO: 1898
  Probe

SEQ ID NO: 51839 - DNA, 16 bp, Artificial Sequence
  Probe
aaagacaccccccaca

SEQ ID NO: 51840 - DNA, 17 bp, Artificial Sequence
  Probe
aaagacaccccccacag

SEQ ID NO: 51841 - DNA, 19 bp, Artificial Sequence
  Probe
aaagacaccccccacagtt

SEQ ID NO: 51842 - DNA, 28 bp, Artificial Sequence
  Probe
aaagacaccccccacagtttatgtagct

SEQ ID NO: 51843 - DNA, 36 bp, Artificial Sequence; identical to SEQ ID NO: 1911
  Probe

SEQ ID NO: 51844 - DNA, 38 bp, Artificial Sequence; identical to SEQ ID NO: 1913
  Probe

SEQ ID NO: 51845 - DNA, 24 bp, Artificial Sequence
  Probe
aaagacaggggttaggcctctttt

SEQ ID NO: 51846 - DNA, 32 bp, Artificial Sequence; identical to SEQ ID NO: 1925
  Probe

SEQ ID NO: 51847 - DNA, 50 bp, Artificial Sequence; identical to SEQ ID NO: 14605
  Probe

SEQ ID NO: 51848 - DNA, 33 bp, Artificial Sequence; identical to SEQ ID NO: 1926
  Probe

SEQ ID NO: 51849 - DNA, 34 bp, Artificial Sequence; identical to SEQ ID NO: 1927
  Probe

SEQ ID NO: 51850 - DNA, 37 bp, Artificial Sequence; identical to SEQ ID NO: 1930
  Probe

SEQ ID NO: 51851 - DNA, 36 bp, Artificial Sequence; identical to SEQ ID NO: 21
  Probe

SEQ ID NO: 51852 - DNA, 44 bp, Artificial Sequence; identical to SEQ ID NO: 22
  Probe

SEQ ID NO: 51853 - DNA, 50 bp, Artificial Sequence; identical to SEQ ID NO: 25
  Probe

SEQ ID NO: 51854 - DNA, 50 bp, Artificial Sequence; identical to SEQ ID NO: 1962
  Probe

SEQ ID NO: 51855 - DNA, 27 bp, Artificial Sequence
  Probe
aaagctcacaagaactgctaactcatg

SEQ ID NO: 51856 - DNA, 50 bp, Artificial Sequence; identical to SEQ ID NO: 32
  Probe

SEQ ID NO: 51857 - DNA, 22 bp, Artificial Sequence
  Probe
aaataagctatcgggcccatac

SEQ ID NO: 51858 - DNA, 24 bp, Artificial Sequence
  Probe
aaataagctatcgggcccataccc

SEQ ID NO: 51859 - DNA, 25 bp, Artificial Sequence
  Probe
aaataagctatcgggcccatacccc

SEQ ID NO: 51860 - DNA, 29 bp, Artificial Sequence
  Probe
aaataagctatcgggcccataccccgaaa

SEQ ID NO: 51861 - DNA, 30 bp, Artificial Sequence; identical to SEQ ID NO: 1982
  Probe

SEQ ID NO: 51862 - DNA, 31 bp, Artificial Sequence; identical to SEQ ID NO: 1983
  Probe

SEQ ID NO: 51863 - DNA, 32 bp, Artificial Sequence; identical to SEQ ID NO: 1984
  Probe

SEQ ID NO: 51864 - DNA, 33 bp, Artificial Sequence; identical to SEQ ID NO: 1985
  Probe

SEQ ID NO: 51865 - DNA, 38 bp, Artificial Sequence; identical to SEQ ID NO: 14670
  Probe

SEQ ID NO: 51866 - DNA, 39 bp, Artificial Sequence; identical to SEQ ID NO: 1987
  Probe

SEQ ID NO: 51867 - DNA, 50 bp, Artificial Sequence; identical to SEQ ID NO: 1989
  Probe

SEQ ID NO: 51868 - DNA, 50 bp, Artificial Sequence
  Probe
aaatatgtctgataaaagagttactttgatagagtaaataataggagctt

SEQ ID NO: 51869 - DNA, 22 bp, Artificial Sequence
  Probe
aaatcccggacgagcccacttc

SEQ ID NO: 51870 - DNA, 23 bp, Artificial Sequence
  Probe
aaatcccggacgagcccacttca

SEQ ID NO: 51871 - DNA, 39 bp, Artificial Sequence; identical to SEQ ID NO: 2009
  Probe

SEQ ID NO: 51872 - DNA, 49 bp, Artificial Sequence; identical to SEQ ID NO: 2012
  Probe

SEQ ID NO: 51873 - DNA, 50 bp, Artificial Sequence; identical to SEQ ID NO: 2013
  Probe

SEQ ID NO: 51874 - DNA, 25 bp, Artificial Sequence
  Probe
aacacaaagcacccaacttacactt

SEQ ID NO: 51875 - DNA, 29 bp, Artificial Sequence
  Probe
aacacaaagcacccaacttacacttagga

SEQ ID NO: 51876 - DNA, 21 bp, Artificial Sequence
  Probe
aacacctctttacagtgaaat

SEQ ID NO: 51877 - DNA, 31 bp, Artificial Sequence; identical to SEQ ID NO: 2039
  Probe

SEQ ID NO: 51878 - DNA, 50 bp, Artificial Sequence; identical to SEQ ID NO: 42
  Probe

SEQ ID NO: 51879 - DNA, 29 bp, Artificial Sequence
  Probe
aaccaaaacatcagattgtgaatctgaca

SEQ ID NO: 51880 - DNA, 30 bp, Artificial Sequence; identical to SEQ ID NO: 2063
  Probe

SEQ ID NO: 51881 - DNA, 31 bp, Artificial Sequence; identical to SEQ ID NO: 2064
  Probe

SEQ ID NO: 51882 - DNA, 32 bp, Artificial Sequence; identical to SEQ ID NO: 2065
  Probe

SEQ ID NO: 51883 - DNA, 33 bp, Artificial Sequence; identical to SEQ ID NO: 2066
  Probe

SEQ ID NO: 51884 - DNA, 34 bp, Artificial Sequence; identical to SEQ ID NO: 14767
  Probe

SEQ ID NO: 51885 - DNA, 35 bp, Artificial Sequence; identical to SEQ ID NO: 14768
  Probe

SEQ ID NO: 51886 - DNA, 36 bp, Artificial Sequence; identical to SEQ ID NO: 2067
  Probe

SEQ ID NO: 51887 - DNA, 37 bp, Artificial Sequence; identical to SEQ ID NO: 2068
  Probe

SEQ ID NO: 51888 - DNA, 38 bp, Artificial Sequence; identical to SEQ ID NO: 2069
  Probe

SEQ ID NO: 51889 - DNA, 39 bp, Artificial Sequence; identical to SEQ ID NO: 2070
  Probe

SEQ ID NO: 51890 - DNA, 25 bp, Artificial Sequence
  Probe
aaccaacacctctttacagtgaaat

SEQ ID NO: 51891 - DNA, 39 bp, Artificial Sequence; identical to SEQ ID NO: 2079
  Probe

SEQ ID NO: 51892 - DNA, 21 bp, Artificial Sequence
  Probe
aaccgagcgtccaagctcttt

SEQ ID NO: 51893 - DNA, 22 bp, Artificial Sequence
  Probe
aaccgagcgtccaagctctttc

SEQ ID NO: 51894 - DNA, 23 bp, Artificial Sequence
  Probe
aaccgagcgtccaagctctttcc

SEQ ID NO: 51895 - DNA, 24 bp, Artificial Sequence
  Probe
aaccgagcgtccaagctctttcca

SEQ ID NO: 51896 - DNA, 25 bp, Artificial Sequence
  Probe
aaccgagcgtccaagctctttccat

SEQ ID NO: 51897 - DNA, 26 bp, Artificial Sequence
  Probe
aaccgagcgtccaagctctttccatt

SEQ ID NO: 51898 - DNA, 27 bp, Artificial Sequence
  Probe
aaccgagcgtccaagctctttccattt

SEQ ID NO: 51899 - DNA, 29 bp, Artificial Sequence
  Probe
aaccggagatgaaaacctttttccaagga

SEQ ID NO: 51900 - DNA, 31 bp, Artificial Sequence; identical to SEQ ID NO: 53
  Probe

SEQ ID NO: 51901 - DNA, 32 bp, Artificial Sequence; identical to SEQ ID NO: 2102
  Probe

SEQ ID NO: 51902 - DNA, 33 bp, Artificial Sequence; identical to SEQ ID NO: 2103
  Probe

SEQ ID NO: 51903 - DNA, 34 bp, Artificial Sequence; identical to SEQ ID NO: 2104
  Probe

SEQ ID NO: 51904 - DNA, 35 bp, Artificial Sequence; identical to SEQ ID NO: 2105
  Probe

SEQ ID NO: 51905 - DNA, 18 bp, Artificial Sequence
  Probe
aaccgggcggaaacacac

SEQ ID NO: 51906 - DNA, 19 bp, Artificial Sequence
  Probe
aaccgggcggaaacacact

SEQ ID NO: 51907 - DNA, 20 bp, Artificial Sequence
  Probe
aaccgggcggaaacacacta

SEQ ID NO: 51908 - DNA, 21 bp, Artificial Sequence
  Probe
aaccgggcggaaacacactaa

SEQ ID NO: 51909 - DNA, 17 bp, Artificial Sequence
  Probe
aaccgggcggaaacacc

SEQ ID NO: 51910 - DNA, 18 bp, Artificial Sequence
  Probe
aaccgggcggaaacacct

SEQ ID NO: 51911 - DNA, 19 bp, Artificial Sequence
  Probe
aaccgggcggaaacacctc

SEQ ID NO: 51912 - DNA, 20 bp, Artificial Sequence
  Probe
aaccgggcggaaacacctcc

SEQ ID NO: 51913 - DNA, 21 bp, Artificial Sequence
  Probe
aaccgggcggaaacacctcct

SEQ ID NO: 51914 - DNA, 22 bp, Artificial Sequence
  Probe
aaccgggcggaaacacctcctt

SEQ ID NO: 51915 - DNA, 18 bp, Artificial Sequence
  Probe
aaccgggcggaaacacgt

SEQ ID NO: 51916 - DNA, 19 bp, Artificial Sequence
  Probe
aaccgggcggaaacacgtt

SEQ ID NO: 51917 - DNA, 20 bp, Artificial Sequence
  Probe
aaccgggcggaaacacgttt

SEQ ID NO: 51918 - DNA, 21 bp, Artificial Sequence
  Probe
aaccgggcggaaacacgtttt

SEQ ID NO: 51919 - DNA, 22 bp, Artificial Sequence
  Probe
aaccgggcggaaacacgttttt

SEQ ID NO: 51920 - DNA, 23 bp, Artificial Sequence
  Probe
aaccgggcggaaacacgtttttt

SEQ ID NO: 51921 - DNA, 20 bp, Artificial Sequence
  Probe
aaccgggcggaaacaggtag

SEQ ID NO: 51922 - DNA, 21 bp, Artificial Sequence
  Probe
aaccgggcggaaacaggtagg

SEQ ID NO: 51923 - DNA, 26 bp, Artificial Sequence
  Probe
aacctagccccaaacccactccacct

SEQ ID NO: 51924 - DNA, 26 bp, Artificial Sequence
  Probe
aacctgccggggcttctcccgccttt

SEQ ID NO: 51925 - DNA, 27 bp, Artificial Sequence
  Probe
aacctgccggggcttctcccgcctttt

SEQ ID NO: 51926 - DNA, 49 bp, Artificial Sequence; identical to SEQ ID NO: 43996
  Probe

SEQ ID NO: 51927 - DNA, 50 bp, Artificial Sequence; identical to SEQ ID NO: 2121
  Probe

SEQ ID NO: 51928 - DNA, 49 bp, Artificial Sequence; identical to SEQ ID NO: 2124
  Probe

SEQ ID NO: 51929 - DNA, 50 bp, Artificial Sequence; identical to SEQ ID NO: 2125
  Probe

SEQ ID NO: 51930 - DNA, 40 bp, Artificial Sequence; identical to SEQ ID NO: 2131
  Probe

SEQ ID NO: 51931 - DNA, 50 bp, Artificial Sequence
  Probe
aactaatacaccagtcttgtaaaccggagatgaaaacctttttccaagga

SEQ ID NO: 51932 - DNA, 19 bp, Artificial Sequence
  Probe
aactcatgcccccatgtct

SEQ ID NO: 51933 - DNA, 20 bp, Artificial Sequence
  Probe
aactcatgcccccatgtcta

SEQ ID NO: 51934 - DNA, 26 bp, Artificial Sequence
  Probe
aactcatgcccccatgtctaacaaca

SEQ ID NO: 51935 - DNA, 31 bp, Artificial Sequence; identical to SEQ ID NO: 2140
  Probe

SEQ ID NO: 51936 - DNA, 32 bp, Artificial Sequence; identical to SEQ ID NO: 2141
  Probe

SEQ ID NO: 51937 - DNA, 33 bp, Artificial Sequence; identical to SEQ ID NO: 2142
  Probe

SEQ ID NO: 51938 - DNA, 34 bp, Artificial Sequence; identical to SEQ ID NO: 2143
  Probe

SEQ ID NO: 51939 - DNA, 35 bp, Artificial Sequence; identical to SEQ ID NO: 2144
  Probe

SEQ ID NO: 51940 - DNA, 36 bp, Artificial Sequence; identical to SEQ ID NO: 2145
  Probe

SEQ ID NO: 51941 - DNA, 37 bp, Artificial Sequence; identical to SEQ ID NO: 2146
  Probe

SEQ ID NO: 51942 - DNA, 38 bp, Artificial Sequence; identical to SEQ ID NO: 2147
  Probe

SEQ ID NO: 51943 - DNA, 39 bp, Artificial Sequence; identical to SEQ ID NO: 2148
  Probe

SEQ ID NO: 51944 - DNA, 40 bp, Artificial Sequence; identical to SEQ ID NO: 2149
  Probe

SEQ ID NO: 51945 - DNA, 41 bp, Artificial Sequence; identical to SEQ ID NO: 14876
  Probe

SEQ ID NO: 51946 - DNA, 43 bp, Artificial Sequence; identical to SEQ ID NO: 14877
  Probe

SEQ ID NO: 51947 - DNA, 15 bp, Artificial Sequence
  Probe
aactgctaactcatg

SEQ ID NO: 51948 - DNA, 27 bp, Artificial Sequence
  Probe
aactgctaactcatgcccccatgtcta

SEQ ID NO: 51949 - DNA, 38 bp, Artificial Sequence; identical to SEQ ID NO: 2157
  Probe

SEQ ID NO: 51950 - DNA, 39 bp, Artificial Sequence; identical to SEQ ID NO: 2158
  Probe

SEQ ID NO: 51951 - DNA, 40 bp, Artificial Sequence; identical to SEQ ID NO: 2159
  Probe

SEQ ID NO: 51952 - DNA, 41 bp, Artificial Sequence; identical to SEQ ID NO: 2160
  Probe

SEQ ID NO: 51953 - DNA, 42 bp, Artificial Sequence; identical to SEQ ID NO: 2161
  Probe

SEQ ID NO: 51954 - DNA, 43 bp, Artificial Sequence; identical to SEQ ID NO: 2162
  Probe

SEQ ID NO: 51955 - DNA, 44 bp, Artificial Sequence; identical to SEQ ID NO: 2163
  Probe

SEQ ID NO: 51956 - DNA, 45 bp, Artificial Sequence; identical to SEQ ID NO: 2164
  Probe

SEQ ID NO: 51957 - DNA, 46 bp, Artificial Sequence; identical to SEQ ID NO: 2165
  Probe

SEQ ID NO: 51958 - DNA, 26 bp, Artificial Sequence
  Probe
aacttaaaactttacagtcagaggtt

SEQ ID NO: 51959 - DNA, 28 bp, Artificial Sequence
  Probe
aacttaaaactttacagtcagaggttca

SEQ ID NO: 51960 - DNA, 29 bp, Artificial Sequence
  Probe
aacttaaaactttacagtcagaggttcaa

SEQ ID NO: 51961 - DNA, 30 bp, Artificial Sequence; identical to SEQ ID NO: 2170
  Probe

SEQ ID NO: 51962 - DNA, 37 bp, Artificial Sequence; identical to SEQ ID NO: 60
  Probe

SEQ ID NO: 51963 - DNA, 39 bp, Artificial Sequence; identical to SEQ ID NO: 62
  Probe

SEQ ID NO: 51964 - DNA, 40 bp, Artificial Sequence; identical to SEQ ID NO: 2173
  Probe

SEQ ID NO: 51965 - DNA, 41 bp, Artificial Sequence; identical to SEQ ID NO: 2174
  Probe

SEQ ID NO: 51966 - DNA, 42 bp, Artificial Sequence; identical to SEQ ID NO: 2175
  Probe

SEQ ID NO: 51967 - DNA, 43 bp, Artificial Sequence; identical to SEQ ID NO: 2176
  Probe

SEQ ID NO: 51968 - DNA, 44 bp, Artificial Sequence; identical to SEQ ID NO: 2177
  Probe

SEQ ID NO: 51969 - DNA, 45 bp, Artificial Sequence; identical to SEQ ID NO: 2178
  Probe

SEQ ID NO: 51970 - DNA, 46 bp, Artificial Sequence; identical to SEQ ID NO: 2179
  Probe

SEQ ID NO: 51971 - DNA, 50 bp, Artificial Sequence; identical to SEQ ID NO: 2180
  Probe

SEQ ID NO: 51972 - DNA, 24 bp, Artificial Sequence
  Probe
aacttaacttgaccgctctgagct

SEQ ID NO: 51973 - DNA, 44 bp, Artificial Sequence; identical to SEQ ID NO: 2194
  Probe

SEQ ID NO: 51974 - DNA, 45 bp, Artificial Sequence; identical to SEQ ID NO: 2195
  Probe

SEQ ID NO: 51975 - DNA, 45 bp, Artificial Sequence; identical to SEQ ID NO: 2203
  Probe

SEQ ID NO: 51976 - DNA, 20 bp, Artificial Sequence
  Probe
aactttacagtcagaggttc

SEQ ID NO: 51977 - DNA, 21 bp, Artificial Sequence
  Probe
aactttacagtcagaggttca

SEQ ID NO: 51978 - DNA, 22 bp, Artificial Sequence
  Probe
aactttacagtcagaggttcaa

SEQ ID NO: 51979 - DNA, 23 bp, Artificial Sequence
  Probe
aactttacagtcagaggttcaat

SEQ ID NO: 51980 - DNA, 24 bp, Artificial Sequence
  Probe
aactttacagtcagaggttcaatt

SEQ ID NO: 51981 - DNA, 26 bp, Artificial Sequence
  Probe
aactttacagtcagaggttcaattcc

SEQ ID NO: 51982 - DNA, 30 bp, Artificial Sequence; identical to SEQ ID NO: 64
  Probe

SEQ ID NO: 51983 - DNA, 31 bp, Artificial Sequence; identical to SEQ ID NO: 65
  Probe

SEQ ID NO: 51984 - DNA, 32 bp, Artificial Sequence; identical to SEQ ID NO: 2206
  Probe

SEQ ID NO: 51985 - DNA, 33 bp, Artificial Sequence; identical to SEQ ID NO: 2207
  Probe

SEQ ID NO: 51986 - DNA, 34 bp, Artificial Sequence; identical to SEQ ID NO: 2208
  Probe

SEQ ID NO: 51987 - DNA, 35 bp, Artificial Sequence; identical to SEQ ID NO: 2209
  Probe

SEQ ID NO: 51988 - DNA, 36 bp, Artificial Sequence; identical to SEQ ID NO: 2210
  Probe

SEQ ID NO: 51989 - DNA, 37 bp, Artificial Sequence; identical to SEQ ID NO: 2211
  Probe

SEQ ID NO: 51990 - DNA, 38 bp, Artificial Sequence; identical to SEQ ID NO: 2212
  Probe

SEQ ID NO: 51991 - DNA, 39 bp, Artificial Sequence; identical to SEQ ID NO: 2213
  Probe

SEQ ID NO: 51992 - DNA, 40 bp, Artificial Sequence; identical to SEQ ID NO: 2214
  Probe

SEQ ID NO: 51993 - DNA, 17 bp, Artificial Sequence
  Probe
aagaacagggtttgtta

SEQ ID NO: 51994 - DNA, 18 bp, Artificial Sequence
  Probe
aagaactgctaactcatg

SEQ ID NO: 51995 - DNA, 41 bp, Artificial Sequence; identical to SEQ ID NO: 66
  Probe

SEQ ID NO: 51996 - DNA, 42 bp, Artificial Sequence; identical to SEQ ID NO: 2227
  Probe

SEQ ID NO: 51997 - DNA, 43 bp, Artificial Sequence; identical to SEQ ID NO: 67
  Probe

SEQ ID NO: 51998 - DNA, 44 bp, Artificial Sequence; identical to SEQ ID NO: 68
  Probe

SEQ ID NO: 51999 - DNA, 45 bp, Artificial Sequence; identical to SEQ ID NO: 69
  Probe

SEQ ID NO: 52000 - DNA, 46 bp, Artificial Sequence; identical to SEQ ID NO: 70
  Probe

SEQ ID NO: 52001 - DNA, 49 bp, Artificial Sequence; identical to SEQ ID NO: 2229
  Probe

SEQ ID NO: 52002 - DNA, 50 bp, Artificial Sequence; identical to SEQ ID NO: 2230
  Probe

SEQ ID NO: 52003 - DNA, 32 bp, Artificial Sequence; identical to SEQ ID NO: 2233
  Probe

SEQ ID NO: 52004 - DNA, 35 bp, Artificial Sequence; identical to SEQ ID NO: 14994
  Probe

SEQ ID NO: 52005 - DNA, 50 bp, Artificial Sequence; identical to SEQ ID NO: 2241
  Probe

SEQ ID NO: 52006 - DNA, 23 bp, Artificial Sequence
  Probe
aagacaggggttaggcctctttt

SEQ ID NO: 52007 - DNA, 30 bp, Artificial Sequence; identical to SEQ ID NO: 2251
  Probe

SEQ ID NO: 52008 - DNA, 46 bp, Artificial Sequence
  Probe
aagagttactttgatagagtaaataataggagcttaaaccccctta

SEQ ID NO: 52009 - DNA, 32 bp, Artificial Sequence; identical to SEQ ID NO: 2257
  Probe

SEQ ID NO: 52010 - DNA, 33 bp, Artificial Sequence; identical to SEQ ID NO: 2258
  Probe

SEQ ID NO: 52011 - DNA, 36 bp, Artificial Sequence; identical to SEQ ID NO: 2260
  Probe

SEQ ID NO: 52012 - DNA, 50 bp, Artificial Sequence; identical to SEQ ID NO: 2283
  Probe

SEQ ID NO: 52013 - DNA, 31 bp, Artificial Sequence
  Probe
aagcatagctgccttccaagcagttgacccg

SEQ ID NO: 52014 - DNA, 22 bp, Artificial Sequence
  Probe
aagctatcgggcccataccccg

SEQ ID NO: 52015 - DNA, 25 bp, Artificial Sequence
  Probe
aagctatcgggcccataccccgaaa

SEQ ID NO: 52016 - DNA, 26 bp, Artificial Sequence
  Probe
aagctatcgggcccataccccgaaaa

SEQ ID NO: 52017 - DNA, 27 bp, Artificial Sequence
  Probe
aagctatcgggcccataccccgaaaat

SEQ ID NO: 52018 - DNA, 28 bp, Artificial Sequence
  Probe
aagctatcgggcccataccccgaaaatg

SEQ ID NO: 52019 - DNA, 29 bp, Artificial Sequence
  Probe
aagctatcgggcccataccccgaaaatgt

SEQ ID NO: 52020 - DNA, 30 bp, Artificial Sequence; identical to SEQ ID NO: 2306
  Probe

SEQ ID NO: 52021 - DNA, 31 bp, Artificial Sequence; identical to SEQ ID NO: 2307
  Probe

SEQ ID NO: 52022 - DNA, 50 bp, Artificial Sequence; identical to SEQ ID NO: 80
  Probe

SEQ ID NO: 52023 - DNA, 26 bp, Artificial Sequence
  Probe
aagctcacaagaactgctaactcatg

SEQ ID NO: 52024 - DNA, 50 bp, Artificial Sequence; identical to SEQ ID NO: 84
  Probe

SEQ ID NO: 52025 - DNA, 25 bp, Artificial Sequence
  Probe
aaggtattagaaaaaccatttcata

SEQ ID NO: 52026 - DNA, 28 bp, Artificial Sequence
  Probe
aaggtattagaaaaaccatttcataact

SEQ ID NO: 52027 - DNA, 25 bp, Artificial Sequence
  Probe
aaggtcagctaaataagctatcggg

SEQ ID NO: 52028 - DNA, 26 bp, Artificial Sequence
  Probe
aaggtcagctaaataagctatcgggc

SEQ ID NO: 52029 - DNA, 27 bp, Artificial Sequence
  Probe
aaggtcagctaaataagctatcgggcc

SEQ ID NO: 52030 - DNA, 29 bp, Artificial Sequence
  Probe
aaggtcagctaaataagctatcgggccca

SEQ ID NO: 52031 - DNA, 30 bp, Artificial Sequence; identical to SEQ ID NO: 2342
  Probe

SEQ ID NO: 52032 - DNA, 31 bp, Artificial Sequence; identical to SEQ ID NO: 2343
  Probe

SEQ ID NO: 52033 - DNA, 32 bp, Artificial Sequence; identical to SEQ ID NO: 2344
  Probe

SEQ ID NO: 52034 - DNA, 33 bp, Artificial Sequence; identical to SEQ ID NO: 2345
  Probe

SEQ ID NO: 52035 - DNA, 34 bp, Artificial Sequence; identical to SEQ ID NO: 2346
  Probe

SEQ ID NO: 52036 - DNA, 35 bp, Artificial Sequence; identical to SEQ ID NO: 15140
  Probe

SEQ ID NO: 52037 - DNA, 39 bp, Artificial Sequence; identical to SEQ ID NO: 2348
  Probe

SEQ ID NO: 52038 - DNA, 40 bp, Artificial Sequence; identical to SEQ ID NO: 2349
  Probe

SEQ ID NO: 52039 - DNA, 41 bp, Artificial Sequence; identical to SEQ ID NO: 2350
  Probe

SEQ ID NO: 52040 - DNA, 42 bp, Artificial Sequence; identical to SEQ ID NO: 2351
  Probe

SEQ ID NO: 52041 - DNA, 43 bp, Artificial Sequence; identical to SEQ ID NO: 2352
  Probe

SEQ ID NO: 52042 - DNA, 44 bp, Artificial Sequence; identical to SEQ ID NO: 2353
  Probe

SEQ ID NO: 52043 - DNA, 45 bp, Artificial Sequence; identical to SEQ ID NO: 2354
  Probe

SEQ ID NO: 52044 - DNA, 46 bp, Artificial Sequence; identical to SEQ ID NO: 2355
  Probe

SEQ ID NO: 52045 - DNA, 50 bp, Artificial Sequence; identical to SEQ ID NO: 2358
  Probe

SEQ ID NO: 52046 - DNA, 26 bp, Artificial Sequence
  Probe
aagtgtactggaaagtgcacttggac

SEQ ID NO: 52047 - DNA, 27 bp, Artificial Sequence
  Probe
aagtgtactggaaagtgcacttggacg

SEQ ID NO: 52048 - DNA, 28 bp, Artificial Sequence
  Probe
aagtgtactggaaagtgcacttggacga

SEQ ID NO: 52049 - DNA, 29 bp, Artificial Sequence
  Probe
aagtgtactggaaagtgcacttggacgaa

SEQ ID NO: 52050 - DNA, 30 bp, Artificial Sequence; identical to SEQ ID NO: 2379
  Probe

SEQ ID NO: 52051 - DNA, 31 bp, Artificial Sequence; identical to SEQ ID NO: 2380
  Probe

SEQ ID NO: 52052 - DNA, 32 bp, Artificial Sequence; identical to SEQ ID NO: 2381
  Probe

SEQ ID NO: 52053 - DNA, 33 bp, Artificial Sequence; identical to SEQ ID NO: 2382
  Probe

SEQ ID NO: 52054 - DNA, 34 bp, Artificial Sequence; identical to SEQ ID NO: 2383
  Probe

SEQ ID NO: 52055 - DNA, 35 bp, Artificial Sequence; identical to SEQ ID NO: 2384
  Probe

SEQ ID NO: 52056 - DNA, 29 bp, Artificial Sequence
  Probe
aagtgtttgtgggtttaagtcccattggt

SEQ ID NO: 52057 - DNA, 42 bp, Artificial Sequence; identical to SEQ ID NO: 2399
  Probe

SEQ ID NO: 52058 - DNA, 21 bp, Artificial Sequence
  Probe
aataacgccaaggtcgcgggt

SEQ ID NO: 52059 - DNA, 30 bp, Artificial Sequence; identical to SEQ ID NO: 2407
  Probe

SEQ ID NO: 52060 - DNA, 50 bp, Artificial Sequence; identical to SEQ ID NO: 2414
  Probe

SEQ ID NO: 52061 - DNA, 30 bp, Artificial Sequence; identical to SEQ ID NO: 2424
  Probe

SEQ ID NO: 52062 - DNA, 21 bp, Artificial Sequence
  Probe
aatcagtgcccggctagctca

SEQ ID NO: 52063 - DNA, 18 bp, Artificial Sequence
  Probe
aatccagcgatccgagtt

SEQ ID NO: 52064 - DNA, 19 bp, Artificial Sequence
  Probe
aatccagcgatccgagttc

SEQ ID NO: 52065 - DNA, 20 bp, Artificial Sequence
  Probe
aatccagcgatccgagttca

SEQ ID NO: 52066 - DNA, 22 bp, Artificial Sequence
  Probe
aatccagcgatccgagttcaaa

SEQ ID NO: 52067 - DNA, 38 bp, Artificial Sequence; identical to SEQ ID NO: 2431
  Probe

SEQ ID NO: 52068 - DNA, 39 bp, Artificial Sequence; identical to SEQ ID NO: 2432
  Probe

SEQ ID NO: 52069 - DNA, 38 bp, Artificial Sequence; identical to SEQ ID NO: 2435
  Probe

SEQ ID NO: 52070 - DNA, 38 bp, Artificial Sequence; identical to SEQ ID NO: 2437
  Probe

SEQ ID NO: 52071 - DNA, 38 bp, Artificial Sequence; identical to SEQ ID NO: 2441
  Probe

SEQ ID NO: 52072 - DNA, 39 bp, Artificial Sequence; identical to SEQ ID NO: 2442
  Probe

SEQ ID NO: 52073 - DNA, 18 bp, Artificial Sequence
  Probe
aatcccaccgctgccaca

SEQ ID NO: 52074 - DNA, 19 bp, Artificial Sequence
  Probe
aatcccaccgctgccacac

SEQ ID NO: 52075 - DNA, 19 bp, Artificial Sequence
  Probe
aatcccaccgctgccagct

SEQ ID NO: 52076 - DNA, 19 bp, Artificial Sequence
  Probe
aatcccaccgctgccaggt

SEQ ID NO: 52077 - DNA, 21 bp, Artificial Sequence
  Probe
aatcccaccgctgccaggttt

SEQ ID NO: 52078 - DNA, 22 bp, Artificial Sequence
  Probe
aatcccaccgctgccaggttta

SEQ ID NO: 52079 - DNA, 19 bp, Artificial Sequence
  Probe
aatcccagcggtgcctccg

SEQ ID NO: 52080 - DNA, 20 bp, Artificial Sequence
  Probe
aatcccatcctcgtcgctcg

SEQ ID NO: 52081 - DNA, 21 bp, Artificial Sequence
  Probe
aatcccatcctcgtcgctcgg

SEQ ID NO: 52082 - DNA, 21 bp, Artificial Sequence
  Probe
aatcccatcctcgtcggctaa

SEQ ID NO: 52083 - DNA, 22 bp, Artificial Sequence
  Probe
aatcccggacgagcccacttca

SEQ ID NO: 52084 - DNA, 17 bp, Artificial Sequence
  Probe
aatcccggacgagcccc

SEQ ID NO: 52085 - DNA, 18 bp, Artificial Sequence
  Probe
aatcccggacgagccccc

SEQ ID NO: 52086 - DNA, 21 bp, Artificial Sequence
  Probe
aatcccggacgagcccccttt

SEQ ID NO: 52087 - DNA, 22 bp, Artificial Sequence
  Probe
aatcccggacgagccccctttt

SEQ ID NO: 52088 - DNA, 21 bp, Artificial Sequence
  Probe
aatcccggacgagccctcatt

SEQ ID NO: 52089 - DNA, 22 bp, Artificial Sequence
  Probe
aatcccggacgagccctcattt

SEQ ID NO: 52090 - DNA, 19 bp, Artificial Sequence
  Probe
aatccgggtgccccctcaa

SEQ ID NO: 52091 - DNA, 20 bp, Artificial Sequence
  Probe
aatccgggtgccccctcaat

SEQ ID NO: 52092 - DNA, 21 bp, Artificial Sequence
  Probe
aatccgggtgccccctcaatg

SEQ ID NO: 52093 - DNA, 22 bp, Artificial Sequence
  Probe
aatccgggtgccccctcaatgg

SEQ ID NO: 52094 - DNA, 21 bp, Artificial Sequence
  Probe
aatccgggtgccccctcacag

SEQ ID NO: 52095 - DNA, 22 bp, Artificial Sequence
  Probe
aatccgggtgccccctcacagc

SEQ ID NO: 52096 - DNA, 19 bp, Artificial Sequence
  Probe
aatccgggtgccccctctt

SEQ ID NO: 52097 - DNA, 20 bp, Artificial Sequence
  Probe
aatccgggtgccccctcttt

SEQ ID NO: 52098 - DNA, 19 bp, Artificial Sequence
  Probe
aatcctatatatcttaatg

SEQ ID NO: 52099 - DNA, 19 bp, Artificial Sequence
  Probe
aatcctgccgactacggca

SEQ ID NO: 52100 - DNA, 19 bp, Artificial Sequence
  Probe
aatcctgccgactacgtca

SEQ ID NO: 52101 - DNA, 29 bp, Artificial Sequence
  Probe
aatcgcataaaacttaaaactttacagtc

SEQ ID NO: 52102 - DNA, 30 bp, Artificial Sequence; identical to SEQ ID NO: 2459
  Probe

SEQ ID NO: 52103 - DNA, 37 bp, Artificial Sequence; identical to SEQ ID NO: 2460
  Probe

SEQ ID NO: 52104 - DNA, 38 bp, Artificial Sequence; identical to SEQ ID NO: 15261
  Probe

SEQ ID NO: 52105 - DNA, 39 bp, Artificial Sequence; identical to SEQ ID NO: 2461
  Probe

SEQ ID NO: 52106 - DNA, 49 bp, Artificial Sequence; identical to SEQ ID NO: 2462
  Probe

SEQ ID NO: 52107 - DNA, 50 bp, Artificial Sequence; identical to SEQ ID NO: 101
  Probe

SEQ ID NO: 52108 - DNA, 30 bp, Artificial Sequence; identical to SEQ ID NO: 106
  Probe

SEQ ID NO: 52109 - DNA, 38 bp, Artificial Sequence; identical to SEQ ID NO: 2479
  Probe

SEQ ID NO: 52110 - DNA, 39 bp, Artificial Sequence; identical to SEQ ID NO: 2480
  Probe

SEQ ID NO: 52111 - DNA, 45 bp, Artificial Sequence; identical to SEQ ID NO: 2484
  Probe

SEQ ID NO: 52112 - DNA, 25 bp, Artificial Sequence
  Probe
aatgccccaactaaatactaccgta

SEQ ID NO: 52113 - DNA, 29 bp, Artificial Sequence
  Probe
aatgccccaactaaatactaccgtatggc

SEQ ID NO: 52114 - DNA, 17 bp, Artificial Sequence
  Probe
aatggttagcactctgg

SEQ ID NO: 52115 - DNA, 18 bp, Artificial Sequence
  Probe
aatggttagcactctgga

SEQ ID NO: 52116 - DNA, 38 bp, Artificial Sequence; identical to SEQ ID NO: 2503
  Probe

SEQ ID NO: 52117 - DNA, 50 bp, Artificial Sequence; identical to SEQ ID NO: 113
  Probe

SEQ ID NO: 52118 - DNA, 38 bp, Artificial Sequence; identical to SEQ ID NO: 2508
  Probe

SEQ ID NO: 52119 - DNA, 16 bp, Artificial Sequence
  Probe
aattctcgcctgccac

SEQ ID NO: 52120 - DNA, 27 bp, Artificial Sequence
  Probe
aattctcgcctgccacgcgggaggccc

SEQ ID NO: 52121 - DNA, 31 bp, Artificial Sequence; identical to SEQ ID NO: 15317
  Probe

SEQ ID NO: 52122 - DNA, 44 bp, Artificial Sequence; identical to SEQ ID NO: 2520
  Probe

SEQ ID NO: 52123 - DNA, 45 bp, Artificial Sequence; identical to SEQ ID NO: 2521
  Probe

SEQ ID NO: 52124 - DNA, 50 bp, Artificial Sequence; identical to SEQ ID NO: 2525
  Probe

SEQ ID NO: 52125 - DNA, 15 bp, Artificial Sequence
  Probe
acaacagaggcttac

SEQ ID NO: 52126 - DNA, 16 bp, Artificial Sequence
  Probe
acaacagaggcttacg

SEQ ID NO: 52127 - DNA, 17 bp, Artificial Sequence
  Probe
acaacagaggcttacga

SEQ ID NO: 52128 - DNA, 18 bp, Artificial Sequence
  Probe
acaacagaggcttacgac

SEQ ID NO: 52129 - DNA, 19 bp, Artificial Sequence
  Probe
acaacagaggcttacgacc

SEQ ID NO: 52130 - DNA, 20 bp, Artificial Sequence
  Probe
acaacagaggcttacgaccc

SEQ ID NO: 52131 - DNA, 21 bp, Artificial Sequence
  Probe
acaacagaggcttacgacccc

SEQ ID NO: 52132 - DNA, 22 bp, Artificial Sequence
  Probe
acaacagaggcttacgacccct

SEQ ID NO: 52133 - DNA, 23 bp, Artificial Sequence
  Probe
acaacagaggcttacgacccctt

SEQ ID NO: 52134 - DNA, 24 bp, Artificial Sequence
  Probe
acaacagaggcttacgacccctta

SEQ ID NO: 52135 - DNA, 25 bp, Artificial Sequence
  Probe
acaacagaggcttacgaccccttat

SEQ ID NO: 52136 - DNA, 26 bp, Artificial Sequence
  Probe
acaacagaggcttacgaccccttatt

SEQ ID NO: 52137 - DNA, 27 bp, Artificial Sequence
  Probe
acaacagaggcttacgaccccttattt

SEQ ID NO: 52138 - DNA, 28 bp, Artificial Sequence
  Probe
acaacagaggcttacgaccccttattta

SEQ ID NO: 52139 - DNA, 29 bp, Artificial Sequence
  Probe
acaacagaggcttacgaccccttatttac

SEQ ID NO: 52140 - DNA, 30 bp, Artificial Sequence; identical to SEQ ID NO: 2562
  Probe

SEQ ID NO: 52141 - DNA, 31 bp, Artificial Sequence; identical to SEQ ID NO: 2563
  Probe

SEQ ID NO: 52142 - DNA, 32 bp, Artificial Sequence; identical to SEQ ID NO: 2564
  Probe

SEQ ID NO: 52143 - DNA, 33 bp, Artificial Sequence; identical to SEQ ID NO: 2565
  Probe

SEQ ID NO: 52144 - DNA, 34 bp, Artificial Sequence; identical to SEQ ID NO: 2566
  Probe

SEQ ID NO: 52145 - DNA, 35 bp, Artificial Sequence; identical to SEQ ID NO: 2567
  Probe

SEQ ID NO: 52146 - DNA, 36 bp, Artificial Sequence; identical to SEQ ID NO: 2568
  Probe

SEQ ID NO: 52147 - DNA, 20 bp, Artificial Sequence
  Probe
acaagaactgctaactcatg

SEQ ID NO: 52148 - DNA, 26 bp, Artificial Sequence
  Probe
acaagaactgctaactcatgccccca

SEQ ID NO: 52149 - DNA, 29 bp, Artificial Sequence
  Probe
acaagaactgctaactcatgcccccatgt

SEQ ID NO: 52150 - DNA, 32 bp, Artificial Sequence; identical to SEQ ID NO: 2585
  Probe

SEQ ID NO: 52151 - DNA, 43 bp, Artificial Sequence; identical to SEQ ID NO: 119
  Probe

SEQ ID NO: 52152 - DNA, 44 bp, Artificial Sequence; identical to SEQ ID NO: 120
  Probe

SEQ ID NO: 52153 - DNA, 45 bp, Artificial Sequence; identical to SEQ ID NO: 121
  Probe

SEQ ID NO: 52154 - DNA, 46 bp, Artificial Sequence; identical to SEQ ID NO: 122
  Probe

SEQ ID NO: 52155 - DNA, 50 bp, Artificial Sequence; identical to SEQ ID NO: 2588
  Probe

SEQ ID NO: 52156 - DNA, 25 bp, Artificial Sequence
  Probe
acacaaagcacccaacttacactta

SEQ ID NO: 52157 - DNA, 30 bp, Artificial Sequence
  Probe
acacaaagcacccaacttacacttaggaga

SEQ ID NO: 52158 - DNA, 50 bp, Artificial Sequence; identical to SEQ ID NO: 2603
  Probe

SEQ ID NO: 52159 - DNA, 24 bp, Artificial Sequence
  Probe
acacccacccaagaacagggtttg

SEQ ID NO: 52160 - DNA, 25 bp, Artificial Sequence
  Probe
acacccacccaagaacagggtttgt

SEQ ID NO: 52161 - DNA, 26 bp, Artificial Sequence
  Probe
acacccacccaagaacagggtttgtt

SEQ ID NO: 52162 - DNA, 27 bp, Artificial Sequence
  Probe
acacccacccaagaacagggtttgtta

SEQ ID NO: 52163 - DNA, 30 bp, Artificial Sequence; identical to SEQ ID NO: 15394
  Probe

SEQ ID NO: 52164 - DNA, 20 bp, Artificial Sequence
  Probe
acacctctttacagtgaaat

SEQ ID NO: 52165 - DNA, 25 bp, Artificial Sequence
  Probe
acacgcagaaggtcctgggttcgag

SEQ ID NO: 52166 - DNA, 41 bp, Artificial Sequence; identical to SEQ ID NO: 15408
  Probe

SEQ ID NO: 52167 - DNA, 42 bp, Artificial Sequence; identical to SEQ ID NO: 2613
  Probe

SEQ ID NO: 52168 - DNA, 44 bp, Artificial Sequence; identical to SEQ ID NO: 44427
  Probe

SEQ ID NO: 52169 - DNA, 45 bp, Artificial Sequence; identical to SEQ ID NO: 44428
  Probe

SEQ ID NO: 52170 - DNA, 16 bp, Artificial Sequence
  Probe
acacgcgaaaggtccc

SEQ ID NO: 52171 - DNA, 39 bp, Artificial Sequence
  Probe
acacgcgaaaggtccccggttcgaaaccgggcagaagca

SEQ ID NO: 52172 - DNA, 41 bp, Artificial Sequence
  Probe
acacgcgaaaggtccccggttcgaaaccgggcagaagcaac

SEQ ID NO: 52173 - DNA, 42 bp, Artificial Sequence
  Probe
acacgcgaaaggtccccggttcgaaaccgggcagaagcaacc

SEQ ID NO: 52174 - DNA, 36 bp, Artificial Sequence; identical to SEQ ID NO: 12531
  Probe

SEQ ID NO: 52175 - DNA, 37 bp, Artificial Sequence; identical to SEQ ID NO: 37792
  Probe

SEQ ID NO: 52176 - DNA, 38 bp, Artificial Sequence
  Probe
acacgcgaaaggtccccggttcgaaaccgggcggaaac

SEQ ID NO: 52177 - DNA, 41 bp, Artificial Sequence
  Probe
acacgcgaaaggtccccggttcgaaaccgggcggaaacaca

SEQ ID NO: 52178 - DNA, 42 bp, Artificial Sequence; identical to SEQ ID NO: 15415
  Probe

SEQ ID NO: 52179 - DNA, 41 bp, Artificial Sequence
  Probe
acacgcgaaaggtccccggttcgaaaccgggcggaaacacg

SEQ ID NO: 52180 - DNA, 35 bp, Artificial Sequence
  Probe
acacgcgaaaggtccccggttcgatcccgggcgga

SEQ ID NO: 52181 - DNA, 36 bp, Artificial Sequence; identical to SEQ ID NO: 37793
  Probe

SEQ ID NO: 52182 - DNA, 41 bp, Artificial Sequence; identical to SEQ ID NO: 44437
  Probe

SEQ ID NO: 52183 - DNA, 42 bp, Artificial Sequence; identical to SEQ ID NO: 37794
  Probe

SEQ ID NO: 52184 - DNA, 22 bp, Artificial Sequence
  Probe
acacgcgaaaggtccccggttt

SEQ ID NO: 52185 - DNA, 25 bp, Artificial Sequence
  Probe
acacgtacacgtcccttcgatagct

SEQ ID NO: 52186 - DNA, 26 bp, Artificial Sequence
  Probe
acacgtacacgtcccttcgatagctc

SEQ ID NO: 52187 - DNA, 45 bp, Artificial Sequence; identical to SEQ ID NO: 2619
  Probe

SEQ ID NO: 52188 - DNA, 46 bp, Artificial Sequence; identical to SEQ ID NO: 2620
  Probe

SEQ ID NO: 52189 - DNA, 31 bp, Artificial Sequence; identical to SEQ ID NO: 2625
  Probe

SEQ ID NO: 52190 - DNA, 38 bp, Artificial Sequence; identical to SEQ ID NO: 2630
  Probe

SEQ ID NO: 52191 - DNA, 39 bp, Artificial Sequence; identical to SEQ ID NO: 2631
  Probe

SEQ ID NO: 52192 - DNA, 40 bp, Artificial Sequence; identical to SEQ ID NO: 2632
  Probe

SEQ ID NO: 52193 - DNA, 41 bp, Artificial Sequence; identical to SEQ ID NO: 2633
  Probe

SEQ ID NO: 52194 - DNA, 17 bp, Artificial Sequence
  Probe
acagaccaagagccttc

SEQ ID NO: 52195 - DNA, 30 bp, Artificial Sequence; identical to SEQ ID NO: 2640
  Probe

SEQ ID NO: 52196 - DNA, 16 bp, Artificial Sequence
  Probe
acagctatccattggt

SEQ ID NO: 52197 - DNA, 49 bp, Artificial Sequence; identical to SEQ ID NO: 2643
  Probe

SEQ ID NO: 52198 - DNA, 50 bp, Artificial Sequence; identical to SEQ ID NO: 2644
  Probe

SEQ ID NO: 52199 - DNA, 21 bp, Artificial Sequence
  Probe
acagtcagaggttcaattcct

SEQ ID NO: 52200 - DNA, 24 bp, Artificial Sequence
  Probe
acagtcagaggttcaattcctctt

SEQ ID NO: 52201 - DNA, 25 bp, Artificial Sequence
  Probe
acagtcagaggttcaattcctcttc

SEQ ID NO: 52202 - DNA, 26 bp, Artificial Sequence
  Probe
acagtcagaggttcaattcctcttct

SEQ ID NO: 52203 - DNA, 27 bp, Artificial Sequence
  Probe
acagtcagaggttcaattcctcttctt

SEQ ID NO: 52204 - DNA, 28 bp, Artificial Sequence
  Probe
acagtcagaggttcaattcctcttctta

SEQ ID NO: 52205 - DNA, 29 bp, Artificial Sequence
  Probe
acagtcagaggttcaattcctcttcttaa

SEQ ID NO: 52206 - DNA, 30 bp, Artificial Sequence; identical to SEQ ID NO: 15478
  Probe

SEQ ID NO: 52207 - DNA, 31 bp, Artificial Sequence; identical to SEQ ID NO: 2654
  Probe

SEQ ID NO: 52208 - DNA, 32 bp, Artificial Sequence; identical to SEQ ID NO: 15480
  Probe

SEQ ID NO: 52209 - DNA, 34 bp, Artificial Sequence; identical to SEQ ID NO: 2656
  Probe

SEQ ID NO: 52210 - DNA, 30 bp, Artificial Sequence; identical to SEQ ID NO: 2668
  Probe

SEQ ID NO: 52211 - DNA, 50 bp, Artificial Sequence; identical to SEQ ID NO: 2685
  Probe

SEQ ID NO: 52212 - DNA, 26 bp, Artificial Sequence
  Probe
acatggtctagcggttaggattcctg

SEQ ID NO: 52213 - DNA, 27 bp, Artificial Sequence
  Probe
acatggtctagcggttaggattcctgg

SEQ ID NO: 52214 - DNA, 28 bp, Artificial Sequence
  Probe
accaaaacatcagattgtgaatctgaca

SEQ ID NO: 52215 - DNA, 29 bp, Artificial Sequence
  Probe
accaaaacatcagattgtgaatctgacaa

SEQ ID NO: 52216 - DNA, 31 bp, Artificial Sequence; identical to SEQ ID NO: 2695
  Probe

SEQ ID NO: 52217 - DNA, 32 bp, Artificial Sequence; identical to SEQ ID NO: 15519
  Probe

SEQ ID NO: 52218 - DNA, 33 bp, Artificial Sequence; identical to SEQ ID NO: 15520
  Probe

SEQ ID NO: 52219 - DNA, 37 bp, Artificial Sequence; identical to SEQ ID NO: 2697
  Probe

SEQ ID NO: 52220 - DNA, 24 bp, Artificial Sequence
  Probe
accaacacctctttacagtgaaat

SEQ ID NO: 52221 - DNA, 25 bp, Artificial Sequence
  Probe
accaacacctctttacagtgaaatg

SEQ ID NO: 52222 - DNA, 18 bp, Artificial Sequence
  Probe
accagaatggccgagtgg

SEQ ID NO: 52223 - DNA, 35 bp, Artificial Sequence; identical to SEQ ID NO: 2717
  Probe

SEQ ID NO: 52224 - DNA, 36 bp, Artificial Sequence; identical to SEQ ID NO: 2718
  Probe

SEQ ID NO: 52225 - DNA, 37 bp, Artificial Sequence; identical to SEQ ID NO: 2719
  Probe

SEQ ID NO: 52226 - DNA, 38 bp, Artificial Sequence; identical to SEQ ID NO: 2720
  Probe

SEQ ID NO: 52227 - DNA, 18 bp, Artificial Sequence
  Probe
accaggatggccgagtgg

SEQ ID NO: 52228 - DNA, 19 bp, Artificial Sequence
  Probe
accaggatggccgagtggt

SEQ ID NO: 52229 - DNA, 20 bp, Artificial Sequence
  Probe
accaggatggccgagtggtt

SEQ ID NO: 52230 - DNA, 21 bp, Artificial Sequence
  Probe
accaggatggccgagtggtta

SEQ ID NO: 52231 - DNA, 22 bp, Artificial Sequence
  Probe
accaggatggccgagtggttaa

SEQ ID NO: 52232 - DNA, 23 bp, Artificial Sequence
  Probe
accaggatggccgagtggttaag

SEQ ID NO: 52233 - DNA, 46 bp, Artificial Sequence; identical to SEQ ID NO: 2729
  Probe

SEQ ID NO: 52234 - DNA, 42 bp, Artificial Sequence; identical to SEQ ID NO: 2744
  Probe

SEQ ID NO: 52235 - DNA, 50 bp, Artificial Sequence; identical to SEQ ID NO: 2749
  Probe

SEQ ID NO: 52236 - DNA, 18 bp, Artificial Sequence
  Probe
acccaagaacagggtttg

SEQ ID NO: 52237 - DNA, 21 bp, Artificial Sequence
  Probe
acccaagaacagggtttgtta

SEQ ID NO: 52238 - DNA, 24 bp, Artificial Sequence
  Probe
acccaagaacagggtttgttaaga

SEQ ID NO: 52239 - DNA, 28 bp, Artificial Sequence
  Probe
acccacacccacccaagaacagggtttg

SEQ ID NO: 52240 - DNA, 29 bp, Artificial Sequence
  Probe
acccacacccacccaagaacagggtttgt

SEQ ID NO: 52241 - DNA, 30 bp, Artificial Sequence; identical to SEQ ID NO: 15572
  Probe

SEQ ID NO: 52242 - DNA, 31 bp, Artificial Sequence; identical to SEQ ID NO: 2755
  Probe

SEQ ID NO: 52243 - DNA, 22 bp, Artificial Sequence
  Probe
acccacccaagaacagggtttg

SEQ ID NO: 52244 - DNA, 24 bp, Artificial Sequence
  Probe
acccacccaagaacagggtttgtt

SEQ ID NO: 52245 - DNA, 25 bp, Artificial Sequence
  Probe
acccacccaagaacagggtttgtta

SEQ ID NO: 52246 - DNA, 39 bp, Artificial Sequence; identical to SEQ ID NO: 2760
  Probe

SEQ ID NO: 52247 - DNA, 29 bp, Artificial Sequence
  Probe
accccgaaaatgttggttatacccttccc

SEQ ID NO: 52248 - DNA, 30 bp, Artificial Sequence; identical to SEQ ID NO: 2769
  Probe

SEQ ID NO: 52249 - DNA, 31 bp, Artificial Sequence; identical to SEQ ID NO: 2770
  Probe

SEQ ID NO: 52250 - DNA, 32 bp, Artificial Sequence; identical to SEQ ID NO: 153
  Probe

SEQ ID NO: 52251 - DNA, 33 bp, Artificial Sequence; identical to SEQ ID NO: 154
  Probe

SEQ ID NO: 52252 - DNA, 34 bp, Artificial Sequence; identical to SEQ ID NO: 155
  Probe

SEQ ID NO: 52253 - DNA, 35 bp, Artificial Sequence; identical to SEQ ID NO: 156
  Probe

SEQ ID NO: 52254 - DNA, 38 bp, Artificial Sequence; identical to SEQ ID NO: 2773
  Probe

SEQ ID NO: 52255 - DNA, 21 bp, Artificial Sequence
  Probe
accctgtggtctagtggttag

SEQ ID NO: 52256 - DNA, 22 bp, Artificial Sequence
  Probe
accctgtggtctagtggttagg

SEQ ID NO: 52257 - DNA, 23 bp, Artificial Sequence
  Probe
accctgtggtctagtggttagga

SEQ ID NO: 52258 - DNA, 34 bp, Artificial Sequence; identical to SEQ ID NO: 157
  Probe

SEQ ID NO: 52259 - DNA, 39 bp, Artificial Sequence; identical to SEQ ID NO: 2797
  Probe

SEQ ID NO: 52260 - DNA, 26 bp, Artificial Sequence
  Probe
accggagatgaaaacctttttccaag

SEQ ID NO: 52261 - DNA, 28 bp, Artificial Sequence
  Probe
accggagatgaaaacctttttccaagga

SEQ ID NO: 52262 - DNA, 29 bp, Artificial Sequence
  Probe
accggagatgaaaacctttttccaaggac

SEQ ID NO: 52263 - DNA, 30 bp, Artificial Sequence; identical to SEQ ID NO: 165
  Probe

SEQ ID NO: 52264 - DNA, 31 bp, Artificial Sequence; identical to SEQ ID NO: 2802
  Probe

SEQ ID NO: 52265 - DNA, 32 bp, Artificial Sequence; identical to SEQ ID NO: 2803
  Probe

SEQ ID NO: 52266 - DNA, 33 bp, Artificial Sequence; identical to SEQ ID NO: 2804
  Probe

SEQ ID NO: 52267 - DNA, 34 bp, Artificial Sequence; identical to SEQ ID NO: 2805
  Probe

SEQ ID NO: 52268 - DNA, 17 bp, Artificial Sequence
  Probe
accgggcggaaacacct

SEQ ID NO: 52269 - DNA, 18 bp, Artificial Sequence
  Probe
accgggcggaaacacctc

SEQ ID NO: 52270 - DNA, 19 bp, Artificial Sequence
  Probe
accgggcggaaacacctcc

SEQ ID NO: 52271 - DNA, 20 bp, Artificial Sequence
  Probe
accgggcggaaacacctcct

SEQ ID NO: 52272 - DNA, 21 bp, Artificial Sequence
  Probe
accgggcggaaacacctcctt

SEQ ID NO: 52273 - DNA, 21 bp, Artificial Sequence
  Probe
accgggcggaaacacgttttt

SEQ ID NO: 52274 - DNA, 30 bp, Artificial Sequence; identical to SEQ ID NO: 2811
  Probe

SEQ ID NO: 52275 - DNA, 50 bp, Artificial Sequence; identical to SEQ ID NO: 2815
  Probe

SEQ ID NO: 52276 - DNA, 25 bp, Artificial Sequence
  Probe
acctagccccaaacccactccacct

SEQ ID NO: 52277 - DNA, 15 bp, Artificial Sequence
  Probe
acctattctcaaact

SEQ ID NO: 52278 - DNA, 16 bp, Artificial Sequence
  Probe
acctattctcaaactt

SEQ ID NO: 52279 - DNA, 17 bp, Artificial Sequence
  Probe
acctattctcaaacttt

SEQ ID NO: 52280 - DNA, 18 bp, Artificial Sequence
  Probe
acctattctcaaacttta

SEQ ID NO: 52281 - DNA, 20 bp, Artificial Sequence
  Probe
acctcagaaggtctcacttt

SEQ ID NO: 52282 - DNA, 21 bp, Artificial Sequence
  Probe
acctcagaaggtctcactttt

SEQ ID NO: 52283 - DNA, 22 bp, Artificial Sequence
  Probe
acctcagaaggtctcacttttc

SEQ ID NO: 52284 - DNA, 15 bp, Artificial Sequence
  Probe
acctcctactcctca

SEQ ID NO: 52285 - DNA, 17 bp, Artificial Sequence
  Probe
acctcctcaaagcaata

SEQ ID NO: 52286 - DNA, 50 bp, Artificial Sequence; identical to SEQ ID NO: 2840
  Probe

SEQ ID NO: 52287 - DNA, 50 bp, Artificial Sequence; identical to SEQ ID NO: 2841
  Probe

SEQ ID NO: 52288 - DNA, 20 bp, Artificial Sequence
  Probe
acgaccccttatttaccgag

SEQ ID NO: 52289 - DNA, 32 bp, Artificial Sequence; identical to SEQ ID NO: 27268
  Probe

SEQ ID NO: 52290 - DNA, 50 bp, Artificial Sequence; identical to SEQ ID NO: 2843
  Probe

SEQ ID NO: 52291 - DNA, 40 bp, Artificial Sequence; identical to SEQ ID NO: 2846
  Probe

SEQ ID NO: 52292 - DNA, 19 bp, Artificial Sequence
  Probe
acgcgaaaggtccccggtt

SEQ ID NO: 52293 - DNA, 19 bp, Artificial Sequence
  Probe
acgcgggagaccggggttc

SEQ ID NO: 52294 - DNA, 20 bp, Artificial Sequence
  Probe
acgcgggagaccggggttca

SEQ ID NO: 52295 - DNA, 21 bp, Artificial Sequence
  Probe
acgcgggagaccggggttcaa

SEQ ID NO: 52296 - DNA, 39 bp, Artificial Sequence; identical to SEQ ID NO: 2861
  Probe

SEQ ID NO: 52297 - DNA, 20 bp, Artificial Sequence
  Probe
acgcgggagaccggggttcg

SEQ ID NO: 52298 - DNA, 39 bp, Artificial Sequence; identical to SEQ ID NO: 2874
  Probe

SEQ ID NO: 52299 - DNA, 39 bp, Artificial Sequence; identical to SEQ ID NO: 2877
  Probe

SEQ ID NO: 52300 - DNA, 19 bp, Artificial Sequence
  Probe
acgcgggaggcccgggttc

SEQ ID NO: 52301 - DNA, 20 bp, Artificial Sequence
  Probe
acgcgggaggcccgggttcg

SEQ ID NO: 52302 - DNA, 20 bp, Artificial Sequence
  Probe
acgcgggaggcccgggtttg

SEQ ID NO: 52303 - DNA, 21 bp, Artificial Sequence
  Probe
acggatcagaagattccaggt

SEQ ID NO: 52304 - DNA, 22 bp, Artificial Sequence
  Probe
acggatcagaagattccaggtt

SEQ ID NO: 52305 - DNA, 21 bp, Artificial Sequence
  Probe
acggatcagaagattctaggt

SEQ ID NO: 52306 - DNA, 22 bp, Artificial Sequence
  Probe
acggatcagaagattctaggtt

SEQ ID NO: 52307 - DNA, 28 bp, Artificial Sequence
  Probe
acgggctcacatcaccccataaacaaat

SEQ ID NO: 52308 - DNA, 16 bp, Artificial Sequence
  Probe
acggtagcgcgtctga

SEQ ID NO: 52309 - DNA, 31 bp, Artificial Sequence; identical to SEQ ID NO: 15898
  Probe

SEQ ID NO: 52310 - DNA, 19 bp, Artificial Sequence
  Probe
actaagtgtttgtgggttt

SEQ ID NO: 52311 - DNA, 38 bp, Artificial Sequence; identical to SEQ ID NO: 2896
  Probe

SEQ ID NO: 52312 - DNA, 39 bp, Artificial Sequence; identical to SEQ ID NO: 2897
  Probe

SEQ ID NO: 52313 - DNA, 40 bp, Artificial Sequence; identical to SEQ ID NO: 2898
  Probe

SEQ ID NO: 52314 - DNA, 41 bp, Artificial Sequence; identical to SEQ ID NO: 2899
  Probe

SEQ ID NO: 52315 - DNA, 50 bp, Artificial Sequence; identical to SEQ ID NO: 2901
  Probe

SEQ ID NO: 52316 - DNA, 24 bp, Artificial Sequence
  Probe
actacggatcagaagattccaggt

SEQ ID NO: 52317 - DNA, 25 bp, Artificial Sequence
  Probe
actacggatcagaagattccaggtt

SEQ ID NO: 52318 - DNA, 25 bp, Artificial Sequence
  Probe
actacggatcagaagattctaggtt

SEQ ID NO: 52319 - DNA, 19 bp, Artificial Sequence
  Probe
actcatgcccccatgtcta

SEQ ID NO: 52320 - DNA, 25 bp, Artificial Sequence
  Probe
actcatgcccccatgtctaacaaca

SEQ ID NO: 52321 - DNA, 30 bp, Artificial Sequence; identical to SEQ ID NO: 2906
  Probe

SEQ ID NO: 52322 - DNA, 31 bp, Artificial Sequence; identical to SEQ ID NO: 2907
  Probe

SEQ ID NO: 52323 - DNA, 32 bp, Artificial Sequence; identical to SEQ ID NO: 2908
  Probe

SEQ ID NO: 52324 - DNA, 33 bp, Artificial Sequence; identical to SEQ ID NO: 2909
  Probe

SEQ ID NO: 52325 - DNA, 34 bp, Artificial Sequence; identical to SEQ ID NO: 2910
  Probe

SEQ ID NO: 52326 - DNA, 35 bp, Artificial Sequence; identical to SEQ ID NO: 2911
  Probe

SEQ ID NO: 52327 - DNA, 36 bp, Artificial Sequence; identical to SEQ ID NO: 2912
  Probe

SEQ ID NO: 52328 - DNA, 37 bp, Artificial Sequence; identical to SEQ ID NO: 2913
  Probe

SEQ ID NO: 52329 - DNA, 38 bp, Artificial Sequence; identical to SEQ ID NO: 2914
  Probe

SEQ ID NO: 52330 - DNA, 39 bp, Artificial Sequence; identical to SEQ ID NO: 2915
  Probe

SEQ ID NO: 52331 - DNA, 40 bp, Artificial Sequence; identical to SEQ ID NO: 15933
  Probe

SEQ ID NO: 52332 - DNA, 35 bp, Artificial Sequence; identical to SEQ ID NO: 2917
  Probe

SEQ ID NO: 52333 - DNA, 19 bp, Artificial Sequence
  Probe
actcccggtatgggaacaa

SEQ ID NO: 52334 - DNA, 17 bp, Artificial Sequence
  Probe
actcccggtgtgggaac

SEQ ID NO: 52335 - DNA, 18 bp, Artificial Sequence
  Probe
actcccggtgtgggaacg

SEQ ID NO: 52336 - DNA, 19 bp, Artificial Sequence
  Probe
actcccggtgtgggaacgc

SEQ ID NO: 52337 - DNA, 16 bp, Artificial Sequence
  Probe
actctgaatccagcga

SEQ ID NO: 52338 - DNA, 19 bp, Artificial Sequence
  Probe
actctgaatccagcgatcc

SEQ ID NO: 52339 - DNA, 20 bp, Artificial Sequence
  Probe
actctgaatccagcgatccg

SEQ ID NO: 52340 - DNA, 21 bp, Artificial Sequence
  Probe
actctgaatccagcgatccga

SEQ ID NO: 52341 - DNA, 23 bp, Artificial Sequence
  Probe
actctgaatccagcgatccgagt

SEQ ID NO: 52342 - DNA, 24 bp, Artificial Sequence
  Probe
actctgaatccagcgatccgagtt

SEQ ID NO: 52343 - DNA, 19 bp, Artificial Sequence
  Probe
actctggactctgaatcca

SEQ ID NO: 52344 - DNA, 31 bp, Artificial Sequence
  Probe
actctggactttgaatccagcgatccgagtt

SEQ ID NO: 52345 - DNA, 16 bp, Artificial Sequence
  Probe
actcttaatcccaggg

SEQ ID NO: 52346 - DNA, 26 bp, Artificial Sequence
  Probe
actcttttagtataaatagtaccgtt

SEQ ID NO: 52347 - DNA, 27 bp, Artificial Sequence
  Probe
actcttttagtataaatagtaccgtta

SEQ ID NO: 52348 - DNA, 28 bp, Artificial Sequence
  Probe
actcttttagtataaatagtaccgttaa

SEQ ID NO: 52349 - DNA, 29 bp, Artificial Sequence
  Probe
actcttttagtataaatagtaccgttaac

SEQ ID NO: 52350 - DNA, 30 bp, Artificial Sequence; identical to SEQ ID NO: 2927
  Probe

SEQ ID NO: 52351 - DNA, 31 bp, Artificial Sequence; identical to SEQ ID NO: 2928
  Probe

SEQ ID NO: 52352 - DNA, 32 bp, Artificial Sequence; identical to SEQ ID NO: 195
  Probe

SEQ ID NO: 52353 - DNA, 33 bp, Artificial Sequence; identical to SEQ ID NO: 196
  Probe

SEQ ID NO: 52354 - DNA, 37 bp, Artificial Sequence; identical to SEQ ID NO: 198
  Probe

SEQ ID NO: 52355 - DNA, 38 bp, Artificial Sequence
  Probe
actcttttagtataaatagtaccgttaacttccaatta

SEQ ID NO: 52356 - DNA, 44 bp, Artificial Sequence; identical to SEQ ID NO: 2930
  Probe

SEQ ID NO: 52357 - DNA, 45 bp, Artificial Sequence; identical to SEQ ID NO: 2931
  Probe

SEQ ID NO: 52358 - DNA, 50 bp, Artificial Sequence; identical to SEQ ID NO: 199
  Probe

SEQ ID NO: 52359 - DNA, 44 bp, Artificial Sequence; identical to SEQ ID NO: 2939
  Probe

SEQ ID NO: 52360 - DNA, 45 bp, Artificial Sequence; identical to SEQ ID NO: 2940
  Probe

SEQ ID NO: 52361 - DNA, 20 bp, Artificial Sequence
  Probe
actgctaactcatgccccca

SEQ ID NO: 52362 - DNA, 23 bp, Artificial Sequence
  Probe
actgctaactcatgcccccatgt

SEQ ID NO: 52363 - DNA, 37 bp, Artificial Sequence; identical to SEQ ID NO: 2947
  Probe

SEQ ID NO: 52364 - DNA, 38 bp, Artificial Sequence; identical to SEQ ID NO: 2948
  Probe

SEQ ID NO: 52365 - DNA, 39 bp, Artificial Sequence; identical to SEQ ID NO: 2949
  Probe

SEQ ID NO: 52366 - DNA, 40 bp, Artificial Sequence; identical to SEQ ID NO: 2950
  Probe

SEQ ID NO: 52367 - DNA, 41 bp, Artificial Sequence; identical to SEQ ID NO: 2951
  Probe

SEQ ID NO: 52368 - DNA, 42 bp, Artificial Sequence; identical to SEQ ID NO: 2952
  Probe

SEQ ID NO: 52369 - DNA, 43 bp, Artificial Sequence; identical to SEQ ID NO: 2953
  Probe

SEQ ID NO: 52370 - DNA, 44 bp, Artificial Sequence; identical to SEQ ID NO: 2954
  Probe

SEQ ID NO: 52371 - DNA, 45 bp, Artificial Sequence; identical to SEQ ID NO: 2955
  Probe

SEQ ID NO: 52372 - DNA, 46 bp, Artificial Sequence; identical to SEQ ID NO: 2956
  Probe

SEQ ID NO: 52373 - DNA, 50 bp, Artificial Sequence; identical to SEQ ID NO: 2958
  Probe

SEQ ID NO: 52374 - DNA, 43 bp, Artificial Sequence; identical to SEQ ID NO: 2960
  Probe

SEQ ID NO: 52375 - DNA, 37 bp, Artificial Sequence; identical to SEQ ID NO: 200
  Probe

SEQ ID NO: 52376 - DNA, 38 bp, Artificial Sequence; identical to SEQ ID NO: 2962
  Probe

SEQ ID NO: 52377 - DNA, 39 bp, Artificial Sequence; identical to SEQ ID NO: 2963
  Probe

SEQ ID NO: 52378 - DNA, 40 bp, Artificial Sequence; identical to SEQ ID NO: 2964
  Probe

SEQ ID NO: 52379 - DNA, 41 bp, Artificial Sequence; identical to SEQ ID NO: 2965
  Probe

SEQ ID NO: 52380 - DNA, 42 bp, Artificial Sequence; identical to SEQ ID NO: 2966
  Probe

SEQ ID NO: 52381 - DNA, 43 bp, Artificial Sequence; identical to SEQ ID NO: 2967
  Probe

SEQ ID NO: 52382 - DNA, 45 bp, Artificial Sequence; identical to SEQ ID NO: 2969
  Probe

SEQ ID NO: 52383 - DNA, 46 bp, Artificial Sequence; identical to SEQ ID NO: 2970
  Probe

SEQ ID NO: 52384 - DNA, 23 bp, Artificial Sequence
  Probe
acttaacttgaccgctctgagct

SEQ ID NO: 52385 - DNA, 35 bp, Artificial Sequence; identical to SEQ ID NO: 2982
  Probe

SEQ ID NO: 52386 - DNA, 37 bp, Artificial Sequence; identical to SEQ ID NO: 2984
  Probe

SEQ ID NO: 52387 - DNA, 42 bp, Artificial Sequence; identical to SEQ ID NO: 2988
  Probe

SEQ ID NO: 52388 - DNA, 43 bp, Artificial Sequence; identical to SEQ ID NO: 2989
  Probe

SEQ ID NO: 52389 - DNA, 44 bp, Artificial Sequence; identical to SEQ ID NO: 2990
  Probe

SEQ ID NO: 52390 - DNA, 45 bp, Artificial Sequence; identical to SEQ ID NO: 2991
  Probe

SEQ ID NO: 52391 - DNA, 38 bp, Artificial Sequence
  Probe
acttagcattaaccttttaagttaaagattaagagaac

SEQ ID NO: 52392 - DNA, 40 bp, Artificial Sequence; identical to SEQ ID NO: 12626
  Probe

SEQ ID NO: 52393 - DNA, 50 bp, Artificial Sequence; identical to SEQ ID NO: 201
  Probe

SEQ ID NO: 52394 - DNA, 37 bp, Artificial Sequence; identical to SEQ ID NO: 3004
  Probe

SEQ ID NO: 52395 - DNA, 38 bp, Artificial Sequence; identical to SEQ ID NO: 3005
  Probe

SEQ ID NO: 52396 - DNA, 42 bp, Artificial Sequence; identical to SEQ ID NO: 44861
  Probe

SEQ ID NO: 52397 - DNA, 44 bp, Artificial Sequence; identical to SEQ ID NO: 3010
  Probe

SEQ ID NO: 52398 - DNA, 19 bp, Artificial Sequence
  Probe
actttacagtcagaggttc

SEQ ID NO: 52399 - DNA, 26 bp, Artificial Sequence
  Probe
actttacagtcagaggttcaattcct

SEQ ID NO: 52400 - DNA, 29 bp, Artificial Sequence
  Probe
actttacagtcagaggttcaattcctctt

SEQ ID NO: 52401 - DNA, 30 bp, Artificial Sequence; identical to SEQ ID NO: 202
  Probe

SEQ ID NO: 52402 - DNA, 31 bp, Artificial Sequence; identical to SEQ ID NO: 3013
  Probe

SEQ ID NO: 52403 - DNA, 32 bp, Artificial Sequence; identical to SEQ ID NO: 3014
  Probe

SEQ ID NO: 52404 - DNA, 33 bp, Artificial Sequence; identical to SEQ ID NO: 3015
  Probe

SEQ ID NO: 52405 - DNA, 34 bp, Artificial Sequence; identical to SEQ ID NO: 44870
  Probe

SEQ ID NO: 52406 - DNA, 35 bp, Artificial Sequence; identical to SEQ ID NO: 3016
  Probe

SEQ ID NO: 52407 - DNA, 36 bp, Artificial Sequence; identical to SEQ ID NO: 16031
  Probe

SEQ ID NO: 52408 - DNA, 38 bp, Artificial Sequence; identical to SEQ ID NO: 3018
  Probe

SEQ ID NO: 52409 - DNA, 39 bp, Artificial Sequence; identical to SEQ ID NO: 3019
  Probe

SEQ ID NO: 52410 - DNA, 16 bp, Artificial Sequence
  Probe
actttgaatccagcga

SEQ ID NO: 52411 - DNA, 21 bp, Artificial Sequence
  Probe
actttgaatccagcgatccga

SEQ ID NO: 52412 - DNA, 25 bp, Artificial Sequence
  Probe
actttgaatccagcgatccgagttc

SEQ ID NO: 52413 - DNA, 26 bp, Artificial Sequence
  Probe
actttgaatccagcgatccgagttca

SEQ ID NO: 52414 - DNA, 34 bp, Artificial Sequence; identical to SEQ ID NO: 3023
  Probe

SEQ ID NO: 52415 - DNA, 35 bp, Artificial Sequence; identical to SEQ ID NO: 3024
  Probe

SEQ ID NO: 52416 - DNA, 36 bp, Artificial Sequence; identical to SEQ ID NO: 3025
  Probe

SEQ ID NO: 52417 - DNA, 37 bp, Artificial Sequence; identical to SEQ ID NO: 203
  Probe

SEQ ID NO: 52418 - DNA, 38 bp, Artificial Sequence; identical to SEQ ID NO: 204
  Probe

SEQ ID NO: 52419 - DNA, 40 bp, Artificial Sequence; identical to SEQ ID NO: 3026
  Probe

SEQ ID NO: 52420 - DNA, 41 bp, Artificial Sequence; identical to SEQ ID NO: 3027
  Probe

SEQ ID NO: 52421 - DNA, 42 bp, Artificial Sequence; identical to SEQ ID NO: 3028
  Probe

SEQ ID NO: 52422 - DNA, 43 bp, Artificial Sequence; identical to SEQ ID NO: 3029
  Probe

SEQ ID NO: 52423 - DNA, 44 bp, Artificial Sequence; identical to SEQ ID NO: 3030
  Probe

SEQ ID NO: 52424 - DNA, 45 bp, Artificial Sequence; identical to SEQ ID NO: 206
  Probe

SEQ ID NO: 52425 - DNA, 46 bp, Artificial Sequence; identical to SEQ ID NO: 3031
  Probe

SEQ ID NO: 52426 - DNA, 49 bp, Artificial Sequence; identical to SEQ ID NO: 3032
  Probe

SEQ ID NO: 52427 - DNA, 50 bp, Artificial Sequence; identical to SEQ ID NO: 3033
  Probe

SEQ ID NO: 52428 - DNA, 20 bp, Artificial Sequence
  Probe
acttttaaaggataacagct

SEQ ID NO: 52429 - DNA, 28 bp, Artificial Sequence
  Probe
acttttaaaggataacagctatccattg

SEQ ID NO: 52430 - DNA, 29 bp, Artificial Sequence
  Probe
acttttaaaggataacagctatccattgg

SEQ ID NO: 52431 - DNA, 30 bp, Artificial Sequence; identical to SEQ ID NO: 209
  Probe

SEQ ID NO: 52432 - DNA, 33 bp, Artificial Sequence; identical to SEQ ID NO: 3035
  Probe

SEQ ID NO: 52433 - DNA, 34 bp, Artificial Sequence; identical to SEQ ID NO: 212
  Probe

SEQ ID NO: 52434 - DNA, 35 bp, Artificial Sequence
  Probe
acttttaaaggataacagctatccattggtcttag

SEQ ID NO: 52435 - DNA, 36 bp, Artificial Sequence; identical to SEQ ID NO: 24952
  Probe

SEQ ID NO: 52436 - DNA, 38 bp, Artificial Sequence; identical to SEQ ID NO: 16055
  Probe

SEQ ID NO: 52437 - DNA, 39 bp, Artificial Sequence; identical to SEQ ID NO: 3036
  Probe

SEQ ID NO: 52438 - DNA, 40 bp, Artificial Sequence; identical to SEQ ID NO: 16056
  Probe

SEQ ID NO: 52439 - DNA, 41 bp, Artificial Sequence; identical to SEQ ID NO: 3037
  Probe

SEQ ID NO: 52440 - DNA, 42 bp, Artificial Sequence; identical to SEQ ID NO: 16058
  Probe

SEQ ID NO: 52441 - DNA, 44 bp, Artificial Sequence; identical to SEQ ID NO: 16059
  Probe

SEQ ID NO: 52442 - DNA, 24 bp, Artificial Sequence
  Probe
acttttaatctgagggtccagggt

SEQ ID NO: 52443 - DNA, 29 bp, Artificial Sequence
  Probe
agaaagctcacaagaactgctaactcatg

SEQ ID NO: 52444 - DNA, 50 bp, Artificial Sequence; identical to SEQ ID NO: 216
  Probe

SEQ ID NO: 52445 - DNA, 33 bp, Artificial Sequence
  Probe
agaaatatgtctgataaaagagttactttgata

SEQ ID NO: 52446 - DNA, 45 bp, Artificial Sequence
  Probe
agaaatatgtctgataaaagagttactttgatagagtaaataata

SEQ ID NO: 52447 - DNA, 50 bp, Artificial Sequence; identical to SEQ ID NO: 217
  Probe

SEQ ID NO: 52448 - DNA, 16 bp, Artificial Sequence
  Probe
agaacagggtttgtta

SEQ ID NO: 52449 - DNA, 27 bp, Artificial Sequence
  Probe
agaaccaacacctctttacagtgaaat

SEQ ID NO: 52450 - DNA, 17 bp, Artificial Sequence
  Probe
agaactgctaactcatg

SEQ ID NO: 52451 - DNA, 40 bp, Artificial Sequence; identical to SEQ ID NO: 218
  Probe

SEQ ID NO: 52452 - DNA, 41 bp, Artificial Sequence; identical to SEQ ID NO: 219
  Probe

SEQ ID NO: 52453 - DNA, 42 bp, Artificial Sequence; identical to SEQ ID NO: 220
  Probe

SEQ ID NO: 52454 - DNA, 43 bp, Artificial Sequence; identical to SEQ ID NO: 221
  Probe

SEQ ID NO: 52455 - DNA, 44 bp, Artificial Sequence; identical to SEQ ID NO: 222
  Probe

SEQ ID NO: 52456 - DNA, 45 bp, Artificial Sequence; identical to SEQ ID NO: 223
  Probe

SEQ ID NO: 52457 - DNA, 46 bp, Artificial Sequence; identical to SEQ ID NO: 224
  Probe

SEQ ID NO: 52458 - DNA, 50 bp, Artificial Sequence; identical to SEQ ID NO: 3070
  Probe

SEQ ID NO: 52459 - DNA, 31 bp, Artificial Sequence; identical to SEQ ID NO: 3091
  Probe

SEQ ID NO: 52460 - DNA, 50 bp, Artificial Sequence; identical to SEQ ID NO: 235
  Probe

SEQ ID NO: 52461 - DNA, 18 bp, Artificial Sequence
  Probe
agaattctcgcctgccac

SEQ ID NO: 52462 - DNA, 19 bp, Artificial Sequence
  Probe
agaattctcgcctgccacg

SEQ ID NO: 52463 - DNA, 20 bp, Artificial Sequence
  Probe
agaattctcgcctgccacgc

SEQ ID NO: 52464 - DNA, 29 bp, Artificial Sequence
  Probe
agaattctcgcctgccacgcgggaggccc

SEQ ID NO: 52465 - DNA, 33 bp, Artificial Sequence; identical to SEQ ID NO: 16134
  Probe

SEQ ID NO: 52466 - DNA, 22 bp, Artificial Sequence
  Probe
agaccggggttcaattccccga

SEQ ID NO: 52467 - DNA, 23 bp, Artificial Sequence
  Probe
agaccggggttcaattccccgac

SEQ ID NO: 52468 - DNA, 23 bp, Artificial Sequence
  Probe
agaccggggttcgattccccgac

SEQ ID NO: 52469 - DNA, 24 bp, Artificial Sequence
  Probe
agaccggggttcgattccccgacg

SEQ ID NO: 52470 - DNA, 32 bp, Artificial Sequence; identical to SEQ ID NO: 3122
  Probe

SEQ ID NO: 52471 - DNA, 30 bp, Artificial Sequence; identical to SEQ ID NO: 3135
  Probe

SEQ ID NO: 52472 - DNA, 21 bp, Artificial Sequence
  Probe
agactcgcggccgccttaaga

SEQ ID NO: 52473 - DNA, 29 bp, Artificial Sequence
  Probe
agagaaccaacacctctttacagtgaaat

SEQ ID NO: 52474 - DNA, 29 bp, Artificial Sequence
  Probe
agagcatgagactcttaatctcagggtcg

SEQ ID NO: 52475 - DNA, 26 bp, Artificial Sequence
  Probe
agagcatgggactcttaatcccaggg

SEQ ID NO: 52476 - DNA, 29 bp, Artificial Sequence
  Probe
agagcatgggactcttaatcccagggtcg

SEQ ID NO: 52477 - DNA, 34 bp, Artificial Sequence; identical to SEQ ID NO: 16211
  Probe

SEQ ID NO: 52478 - DNA, 17 bp, Artificial Sequence
  Probe
agagcccggtaatcgca

SEQ ID NO: 52479 - DNA, 24 bp, Artificial Sequence
  Probe
agagcccggtaatcgcataaaact

SEQ ID NO: 52480 - DNA, 31 bp, Artificial Sequence; identical to SEQ ID NO: 248
  Probe

SEQ ID NO: 52481 - DNA, 32 bp, Artificial Sequence; identical to SEQ ID NO: 3144
  Probe

SEQ ID NO: 52482 - DNA, 33 bp, Artificial Sequence
  Probe
agagcccggtaatcgcataaaacttaaaacttt

SEQ ID NO: 52483 - DNA, 34 bp, Artificial Sequence
  Probe
agagcccggtaatcgcataaaacttaaaacttta

SEQ ID NO: 52484 - DNA, 36 bp, Artificial Sequence; identical to SEQ ID NO: 44984
  Probe

SEQ ID NO: 52485 - DNA, 39 bp, Artificial Sequence; identical to SEQ ID NO: 44985
  Probe

SEQ ID NO: 52486 - DNA, 40 bp, Artificial Sequence; identical to SEQ ID NO: 3145
  Probe

SEQ ID NO: 52487 - DNA, 46 bp, Artificial Sequence; identical to SEQ ID NO: 249
  Probe

SEQ ID NO: 52488 - DNA, 49 bp, Artificial Sequence
  Probe
agagcccggtaatcgcataaaacttaaaactttacagtcagaggttcaa

SEQ ID NO: 52489 - DNA, 31 bp, Artificial Sequence; identical to SEQ ID NO: 252
  Probe

SEQ ID NO: 52490 - DNA, 39 bp, Artificial Sequence; identical to SEQ ID NO: 3158
  Probe

SEQ ID NO: 52491 - DNA, 40 bp, Artificial Sequence; identical to SEQ ID NO: 3159
  Probe

SEQ ID NO: 52492 - DNA, 26 bp, Artificial Sequence
  Probe
agagtggggttttgcagtccttagct

SEQ ID NO: 52493 - DNA, 45 bp, Artificial Sequence
  Probe
agagttactttgatagagtaaataataggagcttaaaccccctta

SEQ ID NO: 52494 - DNA, 50 bp, Artificial Sequence; identical to SEQ ID NO: 3171
  Probe

SEQ ID NO: 52495 - DNA, 28 bp, Artificial Sequence
  Probe
agatgaaaacctttttccaaggacaaat

SEQ ID NO: 52496 - DNA, 31 bp, Artificial Sequence; identical to SEQ ID NO: 3175
  Probe

SEQ ID NO: 52497 - DNA, 32 bp, Artificial Sequence; identical to SEQ ID NO: 3176
  Probe

SEQ ID NO: 52498 - DNA, 35 bp, Artificial Sequence; identical to SEQ ID NO: 3179
  Probe

SEQ ID NO: 52499 - DNA, 21 bp, Artificial Sequence
  Probe
agattcccattcttgcgaccc

SEQ ID NO: 52500 - DNA, 33 bp, Artificial Sequence; identical to SEQ ID NO: 3184
  Probe

SEQ ID NO: 52501 - DNA, 38 bp, Artificial Sequence; identical to SEQ ID NO: 267
  Probe

SEQ ID NO: 52502 - DNA, 39 bp, Artificial Sequence; identical to SEQ ID NO: 268
  Probe

SEQ ID NO: 52503 - DNA, 40 bp, Artificial Sequence; identical to SEQ ID NO: 3198
  Probe

SEQ ID NO: 52504 - DNA, 50 bp, Artificial Sequence; identical to SEQ ID NO: 3205
  Probe

SEQ ID NO: 52505 - DNA, 31 bp, Artificial Sequence; identical to SEQ ID NO: 3215
  Probe

SEQ ID NO: 52506 - DNA, 43 bp, Artificial Sequence; identical to SEQ ID NO: 3246
  Probe

SEQ ID NO: 52507 - DNA, 50 bp, Artificial Sequence; identical to SEQ ID NO: 3251
  Probe

SEQ ID NO: 52508 - DNA, 28 bp, Artificial Sequence
  Probe
agcactctggactctgaatccagcgatc

SEQ ID NO: 52509 - DNA, 31 bp, Artificial Sequence; identical to SEQ ID NO: 271
  Probe

SEQ ID NO: 52510 - DNA, 33 bp, Artificial Sequence; identical to SEQ ID NO: 27739
  Probe

SEQ ID NO: 52511 - DNA, 34 bp, Artificial Sequence; identical to SEQ ID NO: 27740
  Probe

SEQ ID NO: 52512 - DNA, 30 bp, Artificial Sequence; identical to SEQ ID NO: 12674
  Probe

SEQ ID NO: 52513 - DNA, 31 bp, Artificial Sequence; identical to SEQ ID NO: 42515
  Probe

SEQ ID NO: 52514 - DNA, 33 bp, Artificial Sequence; identical to SEQ ID NO: 12675
  Probe

SEQ ID NO: 52515 - DNA, 34 bp, Artificial Sequence; identical to SEQ ID NO: 27746
  Probe

SEQ ID NO: 52516 - DNA, 20 bp, Artificial Sequence
  Probe
agcacttcccatatggtcta

SEQ ID NO: 52517 - DNA, 33 bp, Artificial Sequence; identical to SEQ ID NO: 277
  Probe

SEQ ID NO: 52518 - DNA, 34 bp, Artificial Sequence; identical to SEQ ID NO: 278
  Probe

SEQ ID NO: 52519 - DNA, 28 bp, Artificial Sequence
  Probe
agcatagctgccttccaagcagttgacc

SEQ ID NO: 52520 - DNA, 27 bp, Artificial Sequence
  Probe
agcatgggactcttaatcccagggtcg

SEQ ID NO: 52521 - DNA, 32 bp, Artificial Sequence; identical to SEQ ID NO: 16393
  Probe

SEQ ID NO: 52522 - DNA, 26 bp, Artificial Sequence
  Probe
agcattaaccttttaagttaaagatt

SEQ ID NO: 52523 - DNA, 27 bp, Artificial Sequence
  Probe
agcattaaccttttaagttaaagatta

SEQ ID NO: 52524 - DNA, 32 bp, Artificial Sequence; identical to SEQ ID NO: 16399
  Probe

SEQ ID NO: 52525 - DNA, 33 bp, Artificial Sequence; identical to SEQ ID NO: 12688
  Probe

SEQ ID NO: 52526 - DNA, 34 bp, Artificial Sequence; identical to SEQ ID NO: 12689
  Probe

SEQ ID NO: 52527 - DNA, 37 bp, Artificial Sequence; identical to SEQ ID NO: 282
  Probe

SEQ ID NO: 52528 - DNA, 38 bp, Artificial Sequence; identical to SEQ ID NO: 3273
  Probe

SEQ ID NO: 52529 - DNA, 39 bp, Artificial Sequence; identical to SEQ ID NO: 283
  Probe

SEQ ID NO: 52530 - DNA, 41 bp, Artificial Sequence; identical to SEQ ID NO: 3275
  Probe

SEQ ID NO: 52531 - DNA, 44 bp, Artificial Sequence; identical to SEQ ID NO: 45131
  Probe

SEQ ID NO: 52532 - DNA, 48 bp, Artificial Sequence; identical to SEQ ID NO: 3279
  Probe

SEQ ID NO: 52533 - DNA, 49 bp, Artificial Sequence; identical to SEQ ID NO: 3280
  Probe

SEQ ID NO: 52534 - DNA, 20 bp, Artificial Sequence
  Probe
agccagggattgtgggttcg

SEQ ID NO: 52535 - DNA, 21 bp, Artificial Sequence
  Probe
agccccaaacccactccacct

SEQ ID NO: 52536 - DNA, 24 bp, Artificial Sequence
  Probe
agcccggtaatcgcataaaactta

SEQ ID NO: 52537 - DNA, 30 bp, Artificial Sequence; identical to SEQ ID NO: 16435
  Probe

SEQ ID NO: 52538 - DNA, 38 bp, Artificial Sequence; identical to SEQ ID NO: 292
  Probe

SEQ ID NO: 52539 - DNA, 50 bp, Artificial Sequence; identical to SEQ ID NO: 3296
  Probe

SEQ ID NO: 52540 - DNA, 15 bp, Artificial Sequence
  Probe
agcctttctattagc

SEQ ID NO: 52541 - DNA, 17 bp, Artificial Sequence
  Probe
agcggttaggattcctg

SEQ ID NO: 52542 - DNA, 18 bp, Artificial Sequence
  Probe
agcggttaggattcctgg

SEQ ID NO: 52543 - DNA, 26 bp, Artificial Sequence
  Probe
agcggttaggattcctggttttcacc

SEQ ID NO: 52544 - DNA, 27 bp, Artificial Sequence
  Probe
agcggttaggattcctggttttcaccc

SEQ ID NO: 52545 - DNA, 35 bp, Artificial Sequence
  Probe
agcggttaggattcctggttttcacccaggcggcc

SEQ ID NO: 52546 - DNA, 24 bp, Artificial Sequence
  Probe
agcggttatcacattcgcctcaca

SEQ ID NO: 52547 - DNA, 26 bp, Artificial Sequence
  Probe
agcggttatcacattcgcctcacacg

SEQ ID NO: 52548 - DNA, 31 bp, Artificial Sequence; identical to SEQ ID NO: 3315
  Probe

SEQ ID NO: 52549 - DNA, 25 bp, Artificial Sequence
  Probe
agctaaataagctatcgggcccata

SEQ ID NO: 52550 - DNA, 26 bp, Artificial Sequence
  Probe
agctaaataagctatcgggcccatac

SEQ ID NO: 52551 - DNA, 27 bp, Artificial Sequence
  Probe
agctaaataagctatcgggcccatacc

SEQ ID NO: 52552 - DNA, 28 bp, Artificial Sequence
  Probe
agctaaataagctatcgggcccataccc

SEQ ID NO: 52553 - DNA, 35 bp, Artificial Sequence; identical to SEQ ID NO: 3322
  Probe

SEQ ID NO: 52554 - DNA, 21 bp, Artificial Sequence
  Probe
agctatcgggcccataccccg

SEQ ID NO: 52555 - DNA, 24 bp, Artificial Sequence
  Probe
agctatcgggcccataccccgaaa

SEQ ID NO: 52556 - DNA, 25 bp, Artificial Sequence
  Probe
agctatcgggcccataccccgaaaa

SEQ ID NO: 52557 - DNA, 26 bp, Artificial Sequence
  Probe
agctatcgggcccataccccgaaaat

SEQ ID NO: 52558 - DNA, 27 bp, Artificial Sequence
  Probe
agctatcgggcccataccccgaaaatg

SEQ ID NO: 52559 - DNA, 28 bp, Artificial Sequence
  Probe
agctatcgggcccataccccgaaaatgt

SEQ ID NO: 52560 - DNA, 29 bp, Artificial Sequence
  Probe
agctatcgggcccataccccgaaaatgtt

SEQ ID NO: 52561 - DNA, 30 bp, Artificial Sequence; identical to SEQ ID NO: 3337
  Probe

SEQ ID NO: 52562 - DNA, 33 bp, Artificial Sequence; identical to SEQ ID NO: 3340
  Probe

SEQ ID NO: 52563 - DNA, 50 bp, Artificial Sequence; identical to SEQ ID NO: 303
  Probe

SEQ ID NO: 52564 - DNA, 25 bp, Artificial Sequence
  Probe
agctcacaagaactgctaactcatg

SEQ ID NO: 52565 - DNA, 31 bp, Artificial Sequence; identical to SEQ ID NO: 3351
  Probe

SEQ ID NO: 52566 - DNA, 50 bp, Artificial Sequence; identical to SEQ ID NO: 311
  Probe

SEQ ID NO: 52567 - DNA, 19 bp, Artificial Sequence
  Probe
agctccgaggtgattttca

SEQ ID NO: 52568 - DNA, 21 bp, Artificial Sequence
  Probe
agctccgaggtgattttcata

SEQ ID NO: 52569 - DNA, 28 bp, Artificial Sequence
  Probe
agctccgaggtgattttcatattgaatt

SEQ ID NO: 52570 - DNA, 29 bp, Artificial Sequence
  Probe
agctccgaggtgattttcatattgaattg

SEQ ID NO: 52571 - DNA, 30 bp, Artificial Sequence; identical to SEQ ID NO: 314
  Probe

SEQ ID NO: 52572 - DNA, 32 bp, Artificial Sequence; identical to SEQ ID NO: 316
  Probe

SEQ ID NO: 52573 - DNA, 33 bp, Artificial Sequence; identical to SEQ ID NO: 3363
  Probe

SEQ ID NO: 52574 - DNA, 34 bp, Artificial Sequence; identical to SEQ ID NO: 16559
  Probe

SEQ ID NO: 52575 - DNA, 35 bp, Artificial Sequence; identical to SEQ ID NO: 3364
  Probe

SEQ ID NO: 52576 - DNA, 36 bp, Artificial Sequence; identical to SEQ ID NO: 16561
  Probe

SEQ ID NO: 52577 - DNA, 38 bp, Artificial Sequence; identical to SEQ ID NO: 3366
  Probe

SEQ ID NO: 52578 - DNA, 39 bp, Artificial Sequence; identical to SEQ ID NO: 3367
  Probe

SEQ ID NO: 52579 - DNA, 41 bp, Artificial Sequence
  Probe
agctccgaggtgattttcatattgaattgcaaattcgaaga

SEQ ID NO: 52580 - DNA, 42 bp, Artificial Sequence
  Probe
agctccgaggtgattttcatattgaattgcaaattcgaagaa

SEQ ID NO: 52581 - DNA, 44 bp, Artificial Sequence; identical to SEQ ID NO: 3369
  Probe

SEQ ID NO: 52582 - DNA, 45 bp, Artificial Sequence; identical to SEQ ID NO: 3370
  Probe

SEQ ID NO: 52583 - DNA, 49 bp, Artificial Sequence; identical to SEQ ID NO: 3373
  Probe

SEQ ID NO: 52584 - DNA, 50 bp, Artificial Sequence; identical to SEQ ID NO: 3374
  Probe

SEQ ID NO: 52585 - DNA, 25 bp, Artificial Sequence
  Probe
agcttcaaacctgccggggcttctc

SEQ ID NO: 52586 - DNA, 28 bp, Artificial Sequence
  Probe
agctttggggggttcgattccttccttt

SEQ ID NO: 52587 - DNA, 29 bp, Artificial Sequence
  Probe
agctttggggggttcgattccttcctttt

SEQ ID NO: 52588 - DNA, 32 bp, Artificial Sequence; identical to SEQ ID NO: 3388
  Probe

SEQ ID NO: 52589 - DNA, 35 bp, Artificial Sequence; identical to SEQ ID NO: 3391
  Probe

SEQ ID NO: 52590 - DNA, 45 bp, Artificial Sequence; identical to SEQ ID NO: 3392
  Probe

SEQ ID NO: 52591 - DNA, 50 bp, Artificial Sequence; identical to SEQ ID NO: 3393
  Probe

SEQ ID NO: 52592 - DNA, 27 bp, Artificial Sequence
  Probe
aggagatttcaacttaacttgaccgct

SEQ ID NO: 52593 - DNA, 33 bp, Artificial Sequence; identical to SEQ ID NO: 3413
  Probe

SEQ ID NO: 52594 - DNA, 34 bp, Artificial Sequence; identical to SEQ ID NO: 3414
  Probe

SEQ ID NO: 52595 - DNA, 28 bp, Artificial Sequence
  Probe
aggattcctggttttcacccaggcggcc

SEQ ID NO: 52596 - DNA, 30 bp, Artificial Sequence; identical to SEQ ID NO: 16660
  Probe

SEQ ID NO: 52597 - DNA, 29 bp, Artificial Sequence
  Probe
aggattcctggttttcacccaggtggccc

SEQ ID NO: 52598 - DNA, 17 bp, Artificial Sequence
  Probe
aggattcggcgctctca

SEQ ID NO: 52599 - DNA, 24 bp, Artificial Sequence
  Probe
aggattcggcgctctcaccgccgc

SEQ ID NO: 52600 - DNA, 29 bp, Artificial Sequence
  Probe
aggattcggcgctttcaccgccgcggccc

SEQ ID NO: 52601 - DNA, 18 bp, Artificial Sequence
  Probe
aggcattggcctcctaag

SEQ ID NO: 52602 - DNA, 25 bp, Artificial Sequence
  Probe
aggcattggcctcctaagccaggga

SEQ ID NO: 52603 - DNA, 41 bp, Artificial Sequence; identical to SEQ ID NO: 45284
  Probe

SEQ ID NO: 52604 - DNA, 33 bp, Artificial Sequence; identical to SEQ ID NO: 16671
  Probe

SEQ ID NO: 52605 - DNA, 25 bp, Artificial Sequence
  Probe
aggctaaatcctatatatcttaatg

SEQ ID NO: 52606 - DNA, 25 bp, Artificial Sequence
  Probe
agggattgtgggttcgagtcccatc

SEQ ID NO: 52607 - DNA, 16 bp, Artificial Sequence
  Probe
aggggtatgattctcg

SEQ ID NO: 52608 - DNA, 17 bp, Artificial Sequence
  Probe
aggggtatgattctcgc

SEQ ID NO: 52609 - DNA, 18 bp, Artificial Sequence
  Probe
aggggtatgattctcgct

SEQ ID NO: 52610 - DNA, 36 bp, Artificial Sequence; identical to SEQ ID NO: 16721
  Probe

SEQ ID NO: 52611 - DNA, 36 bp, Artificial Sequence; identical to SEQ ID NO: 16722
  Probe

SEQ ID NO: 52612 - DNA, 36 bp, Artificial Sequence; identical to SEQ ID NO: 16723
  Probe

SEQ ID NO: 52613 - DNA, 22 bp, Artificial Sequence
  Probe
agggtgcgagaggtcccgggtt

SEQ ID NO: 52614 - DNA, 29 bp, Artificial Sequence
  Probe
aggtcagctaaataagctatcgggcccat

SEQ ID NO: 52615 - DNA, 30 bp, Artificial Sequence; identical to SEQ ID NO: 3454
  Probe

SEQ ID NO: 52616 - DNA, 31 bp, Artificial Sequence; identical to SEQ ID NO: 3455
  Probe

SEQ ID NO: 52617 - DNA, 32 bp, Artificial Sequence; identical to SEQ ID NO: 3456
  Probe

SEQ ID NO: 52618 - DNA, 33 bp, Artificial Sequence; identical to SEQ ID NO: 3457
  Probe

SEQ ID NO: 52619 - DNA, 38 bp, Artificial Sequence; identical to SEQ ID NO: 3462
  Probe

SEQ ID NO: 52620 - DNA, 39 bp, Artificial Sequence; identical to SEQ ID NO: 3463
  Probe

SEQ ID NO: 52621 - DNA, 40 bp, Artificial Sequence; identical to SEQ ID NO: 3464
  Probe

SEQ ID NO: 52622 - DNA, 41 bp, Artificial Sequence; identical to SEQ ID NO: 3465
  Probe

SEQ ID NO: 52623 - DNA, 42 bp, Artificial Sequence; identical to SEQ ID NO: 3466
  Probe

SEQ ID NO: 52624 - DNA, 43 bp, Artificial Sequence; identical to SEQ ID NO: 3467
  Probe

SEQ ID NO: 52625 - DNA, 44 bp, Artificial Sequence; identical to SEQ ID NO: 3468
  Probe

SEQ ID NO: 52626 - DNA, 45 bp, Artificial Sequence; identical to SEQ ID NO: 3469
  Probe

SEQ ID NO: 52627 - DNA, 46 bp, Artificial Sequence; identical to SEQ ID NO: 3470
  Probe

SEQ ID NO: 52628 - DNA, 50 bp, Artificial Sequence; identical to SEQ ID NO: 3474
  Probe

SEQ ID NO: 52629 - DNA, 33 bp, Artificial Sequence; identical to SEQ ID NO: 3476
  Probe

SEQ ID NO: 52630 - DNA, 27 bp, Artificial Sequence
  Probe
aggtttggtcctagcctttctattagc

SEQ ID NO: 52631 - DNA, 21 bp, Artificial Sequence
  Probe
agtaaacaggagatcctgggt

SEQ ID NO: 52632 - DNA, 22 bp, Artificial Sequence
  Probe
agtaaacaggagatcctgggtt

SEQ ID NO: 52633 - DNA, 16 bp, Artificial Sequence
  Probe
agtaaggtcagctaaa

SEQ ID NO: 52634 - DNA, 18 bp, Artificial Sequence
  Probe
agtaaggtcagctaaata

SEQ ID NO: 52635 - DNA, 20 bp, Artificial Sequence
  Probe
agtaaggtcagctaaataag

SEQ ID NO: 52636 - DNA, 21 bp, Artificial Sequence
  Probe
agtaaggtcagctaaataagc

SEQ ID NO: 52637 - DNA, 23 bp, Artificial Sequence
  Probe
agtaaggtcagctaaataagcta

SEQ ID NO: 52638 - DNA, 24 bp, Artificial Sequence
  Probe
agtaaggtcagctaaataagctat

SEQ ID NO: 52639 - DNA, 25 bp, Artificial Sequence
  Probe
agtaaggtcagctaaataagctatc

SEQ ID NO: 52640 - DNA, 26 bp, Artificial Sequence
  Probe
agtaaggtcagctaaataagctatcg

SEQ ID NO: 52641 - DNA, 27 bp, Artificial Sequence
  Probe
agtaaggtcagctaaataagctatcgg

SEQ ID NO: 52642 - DNA, 28 bp, Artificial Sequence
  Probe
agtaaggtcagctaaataagctatcggg

SEQ ID NO: 52643 - DNA, 29 bp, Artificial Sequence
  Probe
agtaaggtcagctaaataagctatcgggc

SEQ ID NO: 52644 - DNA, 30 bp, Artificial Sequence; identical to SEQ ID NO: 3514
  Probe

SEQ ID NO: 52645 - DNA, 31 bp, Artificial Sequence; identical to SEQ ID NO: 3515
  Probe

SEQ ID NO: 52646 - DNA, 32 bp, Artificial Sequence; identical to SEQ ID NO: 3516
  Probe

SEQ ID NO: 52647 - DNA, 33 bp, Artificial Sequence; identical to SEQ ID NO: 3517
  Probe

SEQ ID NO: 52648 - DNA, 34 bp, Artificial Sequence; identical to SEQ ID NO: 3518
  Probe

SEQ ID NO: 52649 - DNA, 35 bp, Artificial Sequence; identical to SEQ ID NO: 3519
  Probe

SEQ ID NO: 52650 - DNA, 36 bp, Artificial Sequence; identical to SEQ ID NO: 3520
  Probe

SEQ ID NO: 52651 - DNA, 37 bp, Artificial Sequence; identical to SEQ ID NO: 3521
  Probe

SEQ ID NO: 52652 - DNA, 38 bp, Artificial Sequence; identical to SEQ ID NO: 3522
  Probe

SEQ ID NO: 52653 - DNA, 39 bp, Artificial Sequence; identical to SEQ ID NO: 3523
  Probe

SEQ ID NO: 52654 - DNA, 40 bp, Artificial Sequence; identical to SEQ ID NO: 3524
  Probe

SEQ ID NO: 52655 - DNA, 41 bp, Artificial Sequence; identical to SEQ ID NO: 3525
  Probe

SEQ ID NO: 52656 - DNA, 42 bp, Artificial Sequence; identical to SEQ ID NO: 3526
  Probe

SEQ ID NO: 52657 - DNA, 43 bp, Artificial Sequence; identical to SEQ ID NO: 3527
  Probe

SEQ ID NO: 52658 - DNA, 44 bp, Artificial Sequence; identical to SEQ ID NO: 3528
  Probe

SEQ ID NO: 52659 - DNA, 45 bp, Artificial Sequence; identical to SEQ ID NO: 3529
  Probe

SEQ ID NO: 52660 - DNA, 46 bp, Artificial Sequence; identical to SEQ ID NO: 3530
  Probe

SEQ ID NO: 52661 - DNA, 47 bp, Artificial Sequence; identical to SEQ ID NO: 3531
  Probe

SEQ ID NO: 52662 - DNA, 48 bp, Artificial Sequence; identical to SEQ ID NO: 3532
  Probe

SEQ ID NO: 52663 - DNA, 49 bp, Artificial Sequence; identical to SEQ ID NO: 3533
  Probe

SEQ ID NO: 52664 - DNA, 50 bp, Artificial Sequence; identical to SEQ ID NO: 3534
  Probe

SEQ ID NO: 52665 - DNA, 50 bp, Artificial Sequence; identical to SEQ ID NO: 337
  Probe

SEQ ID NO: 52666 - DNA, 23 bp, Artificial Sequence
  Probe
agtactagcagttttgaaacttc

SEQ ID NO: 52667 - DNA, 28 bp, Artificial Sequence
  Probe
agtatccccgcctgtcacgcgggagacc

SEQ ID NO: 52668 - DNA, 29 bp, Artificial Sequence
  Probe
agtatccccgcctgtcacgcgggagaccg

SEQ ID NO: 52669 - DNA, 30 bp, Artificial Sequence; identical to SEQ ID NO: 12745
  Probe

SEQ ID NO: 52670 - DNA, 23 bp, Artificial Sequence
  Probe
agtcagaggttcaattcctcttc

SEQ ID NO: 52671 - DNA, 32 bp, Artificial Sequence; identical to SEQ ID NO: 3546
  Probe

SEQ ID NO: 52672 - DNA, 19 bp, Artificial Sequence
  Probe
agtccgtgcgagaataatg

SEQ ID NO: 52673 - DNA, 19 bp, Artificial Sequence
  Probe
agtcctgccgcggtcgaag

SEQ ID NO: 52674 - DNA, 23 bp, Artificial Sequence
  Probe
agtcggtagagcatcagactttt

SEQ ID NO: 52675 - DNA, 17 bp, Artificial Sequence
  Probe
agtcggtagagcatgag

SEQ ID NO: 52676 - DNA, 18 bp, Artificial Sequence
  Probe
agtcggtagagcatgaga

SEQ ID NO: 52677 - DNA, 19 bp, Artificial Sequence
  Probe
agtcggtagagcatgagac

SEQ ID NO: 52678 - DNA, 21 bp, Artificial Sequence
  Probe
agtcggtagagcatgagactc

SEQ ID NO: 52679 - DNA, 36 bp, Artificial Sequence; identical to SEQ ID NO: 346
  Probe

SEQ ID NO: 52680 - DNA, 20 bp, Artificial Sequence
  Probe
agtcggtagagcatgggact

SEQ ID NO: 52681 - DNA, 27 bp, Artificial Sequence
  Probe
agtcggtagagcatgggactcttaatc

SEQ ID NO: 52682 - DNA, 29 bp, Artificial Sequence
  Probe
agtcggtagagcatgggactcttaatccc

SEQ ID NO: 52683 - DNA, 36 bp, Artificial Sequence; identical to SEQ ID NO: 354
  Probe

SEQ ID NO: 52684 - DNA, 22 bp, Artificial Sequence
  Probe
agtctcataatctgaaggtcct

SEQ ID NO: 52685 - DNA, 23 bp, Artificial Sequence
  Probe
agtctcataatctgaaggtcctg

SEQ ID NO: 52686 - DNA, 24 bp, Artificial Sequence
  Probe
agtctcataatctgaaggtcctga

SEQ ID NO: 52687 - DNA, 25 bp, Artificial Sequence
  Probe
agtctcataatctgaaggtcctgag

SEQ ID NO: 52688 - DNA, 26 bp, Artificial Sequence
  Probe
agtctcataatctgaaggtcctgagt

SEQ ID NO: 52689 - DNA, 27 bp, Artificial Sequence
  Probe
agtctcataatctgaaggtcctgagtt

SEQ ID NO: 52690 - DNA, 21 bp, Artificial Sequence
  Probe
agtctcataatctgaaggtcg

SEQ ID NO: 52691 - DNA, 28 bp, Artificial Sequence
  Probe
agtctcataatctgaaggtcgtgagttc

SEQ ID NO: 52692 - DNA, 29 bp, Artificial Sequence
  Probe
agtctcataatctgaaggtcgtgagttcg

SEQ ID NO: 52693 - DNA, 30 bp, Artificial Sequence
  Probe
agtctcataatctgaaggtcgtgagttcga

SEQ ID NO: 52694 - DNA, 43 bp, Artificial Sequence; identical to SEQ ID NO: 3569
  Probe

SEQ ID NO: 52695 - DNA, 18 bp, Artificial Sequence
  Probe
agtgcacttggacgaacc

SEQ ID NO: 52696 - DNA, 36 bp, Artificial Sequence; identical to SEQ ID NO: 12756
  Probe

SEQ ID NO: 52697 - DNA, 36 bp, Artificial Sequence; identical to SEQ ID NO: 16927
  Probe

SEQ ID NO: 52698 - DNA, 17 bp, Artificial Sequence
  Probe
agtggtagaattctcgc

SEQ ID NO: 52699 - DNA, 18 bp, Artificial Sequence
  Probe
agtggtagaattctcgcc

SEQ ID NO: 52700 - DNA, 19 bp, Artificial Sequence
  Probe
agtggtagaattctcgcct

SEQ ID NO: 52701 - DNA, 20 bp, Artificial Sequence
  Probe
agtggtagaattctcgcctg

SEQ ID NO: 52702 - DNA, 21 bp, Artificial Sequence
  Probe
agtggtagaattctcgcctgc

SEQ ID NO: 52703 - DNA, 22 bp, Artificial Sequence
  Probe
agtggtagaattctcgcctgcc

SEQ ID NO: 52704 - DNA, 17 bp, Artificial Sequence
  Probe
agtggtagagcatttga

SEQ ID NO: 52705 - DNA, 17 bp, Artificial Sequence
  Probe
agtggtagagcgcatgc

SEQ ID NO: 52706 - DNA, 16 bp, Artificial Sequence
  Probe
agtggtatcatgcaag

SEQ ID NO: 52707 - DNA, 17 bp, Artificial Sequence
  Probe
agtggtatcatgcaaga

SEQ ID NO: 52708 - DNA, 26 bp, Artificial Sequence
  Probe
agtggtatcatgcaagattcccattc

SEQ ID NO: 52709 - DNA, 35 bp, Artificial Sequence
  Probe
agtggtatcatgcaagattcccattcttgcgaccc

SEQ ID NO: 52710 - DNA, 36 bp, Artificial Sequence
  Probe
agtggtatcatgcaagattcccattcttgcgacccg

SEQ ID NO: 52711 - DNA, 37 bp, Artificial Sequence
  Probe
agtggtatcatgcaagattcccattcttgcgacccgg

SEQ ID NO: 52712 - DNA, 17 bp, Artificial Sequence
  Probe
agtggtatgattctcgc

SEQ ID NO: 52713 - DNA, 18 bp, Artificial Sequence
  Probe
agtggtatgattctcgct

SEQ ID NO: 52714 - DNA, 36 bp, Artificial Sequence; identical to SEQ ID NO: 16938
  Probe

SEQ ID NO: 52715 - DNA, 16 bp, Artificial Sequence
  Probe
agtggtgagtatcccc

SEQ ID NO: 52716 - DNA, 17 bp, Artificial Sequence
  Probe
agtggtgagtatccccg

SEQ ID NO: 52717 - DNA, 18 bp, Artificial Sequence
  Probe
agtggtgagtatccccgc

SEQ ID NO: 52718 - DNA, 19 bp, Artificial Sequence
  Probe
agtggtgagtatccccgcc

SEQ ID NO: 52719 - DNA, 23 bp, Artificial Sequence
  Probe
agtggtgagtatccccgcctgtc

SEQ ID NO: 52720 - DNA, 24 bp, Artificial Sequence
  Probe
agtggtgagtatccccgcctgtca

SEQ ID NO: 52721 - DNA, 25 bp, Artificial Sequence
  Probe
agtggtgagtatccccgcctgtcac

SEQ ID NO: 52722 - DNA, 26 bp, Artificial Sequence
  Probe
agtggtgagtatccccgcctgtcacg

SEQ ID NO: 52723 - DNA, 27 bp, Artificial Sequence
  Probe
agtggtgagtatccccgcctgtcacgc

SEQ ID NO: 52724 - DNA, 35 bp, Artificial Sequence; identical to SEQ ID NO: 16948
  Probe

SEQ ID NO: 52725 - DNA, 36 bp, Artificial Sequence; identical to SEQ ID NO: 12765
  Probe

SEQ ID NO: 52726 - DNA, 37 bp, Artificial Sequence; identical to SEQ ID NO: 12766
  Probe

SEQ ID NO: 52727 - DNA, 36 bp, Artificial Sequence; identical to SEQ ID NO: 12768
  Probe

SEQ ID NO: 52728 - DNA, 16 bp, Artificial Sequence
  Probe
agtggttaggattcgg

SEQ ID NO: 52729 - DNA, 17 bp, Artificial Sequence
  Probe
agtggttaggattcggc

SEQ ID NO: 52730 - DNA, 21 bp, Artificial Sequence
  Probe
agtggttaggattcggcgctc

SEQ ID NO: 52731 - DNA, 22 bp, Artificial Sequence
  Probe
agtggttaggattcggcgctct

SEQ ID NO: 52732 - DNA, 26 bp, Artificial Sequence
  Probe
agtggttaggattcggcgctctcacc

SEQ ID NO: 52733 - DNA, 28 bp, Artificial Sequence
  Probe
agtggttaggattcggcgctctcaccgc

SEQ ID NO: 52734 - DNA, 30 bp, Artificial Sequence
  Probe
agtggttaggattcggcgctctcaccgccg

SEQ ID NO: 52735 - DNA, 32 bp, Artificial Sequence; identical to SEQ ID NO: 16957
  Probe

SEQ ID NO: 52736 - DNA, 33 bp, Artificial Sequence; identical to SEQ ID NO: 16958
  Probe

SEQ ID NO: 52737 - DNA, 40 bp, Artificial Sequence; identical to SEQ ID NO: 12779
  Probe

SEQ ID NO: 52738 - DNA, 16 bp, Artificial Sequence
  Probe
agtggttagtactctg

SEQ ID NO: 52739 - DNA, 17 bp, Artificial Sequence
  Probe
agtggttagtactctgc

SEQ ID NO: 52740 - DNA, 19 bp, Artificial Sequence
  Probe
agtggttagtactctgcgt

SEQ ID NO: 52741 - DNA, 19 bp, Artificial Sequence
  Probe
agtggttatcacgttcgcc

SEQ ID NO: 52742 - DNA, 41 bp, Artificial Sequence; identical to SEQ ID NO: 16965
  Probe

SEQ ID NO: 52743 - DNA, 25 bp, Artificial Sequence
  Probe
agtggttatcacgttcgcctcacac

SEQ ID NO: 52744 - DNA, 27 bp, Artificial Sequence
  Probe
agtggttatcacgttcgcctcacacgc

SEQ ID NO: 52745 - DNA, 41 bp, Artificial Sequence; identical to SEQ ID NO: 16968
  Probe

SEQ ID NO: 52746 - DNA, 28 bp, Artificial Sequence
  Probe
agtgtttgtgggtttaagtcccattggt

SEQ ID NO: 52747 - DNA, 29 bp, Artificial Sequence
  Probe
agtgtttgtgggtttaagtcccattggtc

SEQ ID NO: 52748 - DNA, 30 bp, Artificial Sequence; identical to SEQ ID NO: 3599
  Probe

SEQ ID NO: 52749 - DNA, 37 bp, Artificial Sequence; identical to SEQ ID NO: 3604
  Probe

SEQ ID NO: 52750 - DNA, 38 bp, Artificial Sequence; identical to SEQ ID NO: 3605
  Probe

SEQ ID NO: 52751 - DNA, 41 bp, Artificial Sequence; identical to SEQ ID NO: 3608
  Probe

SEQ ID NO: 52752 - DNA, 50 bp, Artificial Sequence; identical to SEQ ID NO: 3610
  Probe

SEQ ID NO: 52753 - DNA, 35 bp, Artificial Sequence; identical to SEQ ID NO: 3616
  Probe

SEQ ID NO: 52754 - DNA, 40 bp, Artificial Sequence
  Probe
agttgattagggtgcttagctgttaactaagtgtttgtgg

SEQ ID NO: 52755 - DNA, 44 bp, Artificial Sequence; identical to SEQ ID NO: 3617
  Probe

SEQ ID NO: 52756 - DNA, 45 bp, Artificial Sequence
  Probe
agttgattagggtgcttagctgttaactaagtgtttgtgggttta

SEQ ID NO: 52757 - DNA, 50 bp, Artificial Sequence; identical to SEQ ID NO: 365
  Probe

SEQ ID NO: 52758 - DNA, 37 bp, Artificial Sequence; identical to SEQ ID NO: 3621
  Probe

SEQ ID NO: 52759 - DNA, 23 bp, Artificial Sequence
  Probe
ataacccagaggtcgatggatcg

SEQ ID NO: 52760 - DNA, 24 bp, Artificial Sequence
  Probe
ataacccagaggtcgatggatcga

SEQ ID NO: 52761 - DNA, 42 bp, Artificial Sequence; identical to SEQ ID NO: 3634
  Probe

SEQ ID NO: 52762 - DNA, 41 bp, Artificial Sequence; identical to SEQ ID NO: 17043
  Probe

SEQ ID NO: 52763 - DNA, 42 bp, Artificial Sequence
  Probe
ataacccagaggtcgatggatcgaaaccatcctctgctatcg

SEQ ID NO: 52764 - DNA, 42 bp, Artificial Sequence
  Probe
ataacccagaggtcgatggatcgaaaccatcctctgctattt

SEQ ID NO: 52765 - DNA, 25 bp, Artificial Sequence
  Probe
ataagctatcgggcccataccccga

SEQ ID NO: 52766 - DNA, 27 bp, Artificial Sequence
  Probe
ataagctatcgggcccataccccgaaa

SEQ ID NO: 52767 - DNA, 28 bp, Artificial Sequence
  Probe
ataagctatcgggcccataccccgaaaa

SEQ ID NO: 52768 - DNA, 29 bp, Artificial Sequence
  Probe
ataagctatcgggcccataccccgaaaat

SEQ ID NO: 52769 - DNA, 30 bp, Artificial Sequence; identical to SEQ ID NO: 3643
  Probe

SEQ ID NO: 52770 - DNA, 31 bp, Artificial Sequence; identical to SEQ ID NO: 3644
  Probe

SEQ ID NO: 52771 - DNA, 20 bp, Artificial Sequence
  Probe
ataatcatatttaccaaatg

SEQ ID NO: 52772 - DNA, 50 bp, Artificial Sequence; identical to SEQ ID NO: 3654
  Probe

SEQ ID NO: 52773 - DNA, 29 bp, Artificial Sequence
  Probe
atacccacacccacccaagaacagggttt

SEQ ID NO: 52774 - DNA, 30 bp, Artificial Sequence; identical to SEQ ID NO: 3660
  Probe

SEQ ID NO: 52775 - DNA, 31 bp, Artificial Sequence; identical to SEQ ID NO: 3661
  Probe

SEQ ID NO: 52776 - DNA, 32 bp, Artificial Sequence; identical to SEQ ID NO: 3662
  Probe

SEQ ID NO: 52777 - DNA, 33 bp, Artificial Sequence; identical to SEQ ID NO: 3663
  Probe

SEQ ID NO: 52778 - DNA, 34 bp, Artificial Sequence; identical to SEQ ID NO: 17095
  Probe

SEQ ID NO: 52779 - DNA, 35 bp, Artificial Sequence
  Probe
atacccacacccacccaagaacagggtttgttaag

SEQ ID NO: 52780 - DNA, 36 bp, Artificial Sequence; identical to SEQ ID NO: 17096
  Probe

SEQ ID NO: 52781 - DNA, 30 bp, Artificial Sequence
  Probe
ataccccgaaaatgttggttatacccttcc

SEQ ID NO: 52782 - DNA, 32 bp, Artificial Sequence; identical to SEQ ID NO: 3664
  Probe

SEQ ID NO: 52783 - DNA, 33 bp, Artificial Sequence
  Probe
ataccccgaaaatgttggttatacccttcccgt

SEQ ID NO: 52784 - DNA, 34 bp, Artificial Sequence; identical to SEQ ID NO: 3665
  Probe

SEQ ID NO: 52785 - DNA, 35 bp, Artificial Sequence
  Probe
ataccccgaaaatgttggttatacccttcccgtac

SEQ ID NO: 52786 - DNA, 36 bp, Artificial Sequence; identical to SEQ ID NO: 17099
  Probe

SEQ ID NO: 52787 - DNA, 37 bp, Artificial Sequence; identical to SEQ ID NO: 12794
  Probe

SEQ ID NO: 52788 - DNA, 39 bp, Artificial Sequence; identical to SEQ ID NO: 3666
  Probe

SEQ ID NO: 52789 - DNA, 40 bp, Artificial Sequence; identical to SEQ ID NO: 3667
  Probe

SEQ ID NO: 52790 - DNA, 42 bp, Artificial Sequence; identical to SEQ ID NO: 3671
  Probe

SEQ ID NO: 52791 - DNA, 25 bp, Artificial Sequence
  Probe
atagctcagtcggtagagcatcaga

SEQ ID NO: 52792 - DNA, 27 bp, Artificial Sequence
  Probe
ataggctaaatcctatatatcttaatg

SEQ ID NO: 52793 - DNA, 17 bp, Artificial Sequence
  Probe
ataggtttggtcctagc

SEQ ID NO: 52794 - DNA, 18 bp, Artificial Sequence
  Probe
ataggtttggtcctagcc

SEQ ID NO: 52795 - DNA, 19 bp, Artificial Sequence
  Probe
ataggtttggtcctagcct

SEQ ID NO: 52796 - DNA, 20 bp, Artificial Sequence
  Probe
ataggtttggtcctagcctt

SEQ ID NO: 52797 - DNA, 21 bp, Artificial Sequence
  Probe
ataggtttggtcctagccttt

SEQ ID NO: 52798 - DNA, 22 bp, Artificial Sequence
  Probe
ataggtttggtcctagcctttc

SEQ ID NO: 52799 - DNA, 23 bp, Artificial Sequence
  Probe
ataggtttggtcctagcctttct

SEQ ID NO: 52800 - DNA, 24 bp, Artificial Sequence
  Probe
ataggtttggtcctagcctttcta

SEQ ID NO: 52801 - DNA, 26 bp, Artificial Sequence
  Probe
ataggtttggtcctagcctttctatt

SEQ ID NO: 52802 - DNA, 27 bp, Artificial Sequence
  Probe
ataggtttggtcctagcctttctatta

SEQ ID NO: 52803 - DNA, 29 bp, Artificial Sequence
  Probe
ataggtttggtcctagcctttctattagc

SEQ ID NO: 52804 - DNA, 50 bp, Artificial Sequence; identical to SEQ ID NO: 3687
  Probe

SEQ ID NO: 52805 - DNA, 39 bp, Artificial Sequence; identical to SEQ ID NO: 3695
  Probe

SEQ ID NO: 52806 - DNA, 23 bp, Artificial Sequence
  Probe
atatccaaccttcagctataggg

SEQ ID NO: 52807 - DNA, 24 bp, Artificial Sequence
  Probe
atatccaaccttcagctatagggt

SEQ ID NO: 52808 - DNA, 50 bp, Artificial Sequence; identical to SEQ ID NO: 3698
  Probe

SEQ ID NO: 52809 - DNA, 17 bp, Artificial Sequence
  Probe
atcagaagattccaggt

SEQ ID NO: 52810 - DNA, 17 bp, Artificial Sequence
  Probe
atcagaagattctaggt

SEQ ID NO: 52811 - DNA, 39 bp, Artificial Sequence; identical to SEQ ID NO: 3707
  Probe

SEQ ID NO: 52812 - DNA, 50 bp, Artificial Sequence; identical to SEQ ID NO: 3714
  Probe

SEQ ID NO: 52813 - DNA, 37 bp, Artificial Sequence; identical to SEQ ID NO: 3718
  Probe

SEQ ID NO: 52814 - DNA, 17 bp, Artificial Sequence
  Probe
atccagcgatccgagtt

SEQ ID NO: 52815 - DNA, 19 bp, Artificial Sequence
  Probe
atccagcgatccgagttca

SEQ ID NO: 52816 - DNA, 18 bp, Artificial Sequence
  Probe
atccaggtgccccctccc

SEQ ID NO: 52817 - DNA, 19 bp, Artificial Sequence
  Probe
atccaggtgccccctccct

SEQ ID NO: 52818 - DNA, 21 bp, Artificial Sequence
  Probe
atcccaccgctgccaagtact

SEQ ID NO: 52819 - DNA, 17 bp, Artificial Sequence
  Probe
atcccaccgctgccaca

SEQ ID NO: 52820 - DNA, 18 bp, Artificial Sequence
  Probe
atcccaccgctgccacac

SEQ ID NO: 52821 - DNA, 19 bp, Artificial Sequence
  Probe
atcccaccgctgccacacc

SEQ ID NO: 52822 - DNA, 20 bp, Artificial Sequence
  Probe
atcccaccgctgccacacct

SEQ ID NO: 52823 - DNA, 21 bp, Artificial Sequence
  Probe
atcccaccgctgccacacctc

SEQ ID NO: 52824 - DNA, 22 bp, Artificial Sequence
  Probe
atcccaccgctgccacacctca

SEQ ID NO: 52825 - DNA, 23 bp, Artificial Sequence
  Probe
atcccaccgctgccacacctcag

SEQ ID NO: 52826 - DNA, 20 bp, Artificial Sequence
  Probe
atcccaccgctgccaggtgc

SEQ ID NO: 52827 - DNA, 20 bp, Artificial Sequence
  Probe
atcccaccgctgccaggttt

SEQ ID NO: 52828 - DNA, 21 bp, Artificial Sequence
  Probe
atcccaccgctgccaggttta

SEQ ID NO: 52829 - DNA, 22 bp, Artificial Sequence
  Probe
atcccaccgctgccaggtttat

SEQ ID NO: 52830 - DNA, 23 bp, Artificial Sequence
  Probe
atcccaccgctgccaggtttatt

SEQ ID NO: 52831 - DNA, 18 bp, Artificial Sequence
  Probe
atcccactcctgacagtt

SEQ ID NO: 52832 - DNA, 16 bp, Artificial Sequence
  Probe
atcccacttctgacac

SEQ ID NO: 52833 - DNA, 18 bp, Artificial Sequence
  Probe
atcccagcggtgcctccg

SEQ ID NO: 52834 - DNA, 19 bp, Artificial Sequence
  Probe
atcccatcctcgtcgctcg

SEQ ID NO: 52835 - DNA, 20 bp, Artificial Sequence
  Probe
atcccatcctcgtcgctcgg

SEQ ID NO: 52836 - DNA, 20 bp, Artificial Sequence
  Probe
atccccggcacctccaccag

SEQ ID NO: 52837 - DNA, 21 bp, Artificial Sequence
  Probe
atccccggcacctccaccagt

SEQ ID NO: 52838 - DNA, 22 bp, Artificial Sequence
  Probe
atccccggcacctccaccagtt

SEQ ID NO: 52839 - DNA, 19 bp, Artificial Sequence
  Probe
atccccggcatctccattg

SEQ ID NO: 52840 - DNA, 21 bp, Artificial Sequence
  Probe
atccccggcatctccattgta

SEQ ID NO: 52841 - DNA, 16 bp, Artificial Sequence
  Probe
atcccggacgagcccc

SEQ ID NO: 52842 - DNA, 17 bp, Artificial Sequence
  Probe
atcccggacgagccccc

SEQ ID NO: 52843 - DNA, 18 bp, Artificial Sequence
  Probe
atcccggacgagccccct

SEQ ID NO: 52844 - DNA, 19 bp, Artificial Sequence
  Probe
atcccggacgagccccctt

SEQ ID NO: 52845 - DNA, 20 bp, Artificial Sequence
  Probe
atcccggacgagcccccttt

SEQ ID NO: 52846 - DNA, 21 bp, Artificial Sequence
  Probe
atcccggacgagccccctttt

SEQ ID NO: 52847 - DNA, 17 bp, Artificial Sequence
  Probe
atcccggacgagcccct

SEQ ID NO: 52848 - DNA, 18 bp, Artificial Sequence
  Probe
atcccggacgagcccggt

SEQ ID NO: 52849 - DNA, 20 bp, Artificial Sequence
  Probe
atcccggacgagcccggttt

SEQ ID NO: 52850 - DNA, 22 bp, Artificial Sequence
  Probe
atcccggacgagccctcatttt

SEQ ID NO: 52851 - DNA, 21 bp, Artificial Sequence
  Probe
atcccgggtttcggcacttcc

SEQ ID NO: 52852 - DNA, 20 bp, Artificial Sequence
  Probe
atcccgggtttcggcagcta

SEQ ID NO: 52853 - DNA, 18 bp, Artificial Sequence
  Probe
atccggctcgaaggacga

SEQ ID NO: 52854 - DNA, 19 bp, Artificial Sequence
  Probe
atccggctcgaaggacgaa

SEQ ID NO: 52855 - DNA, 20 bp, Artificial Sequence
  Probe
atccggctcgaaggacgaaa

SEQ ID NO: 52856 - DNA, 16 bp, Artificial Sequence
  Probe
atccgggtgccccctc

SEQ ID NO: 52857 - DNA, 18 bp, Artificial Sequence
  Probe
atccgggtgccccctcaa

SEQ ID NO: 52858 - DNA, 19 bp, Artificial Sequence
  Probe
atccgggtgccccctcaat

SEQ ID NO: 52859 - DNA, 20 bp, Artificial Sequence
  Probe
atccgggtgccccctcaatg

SEQ ID NO: 52860 - DNA, 21 bp, Artificial Sequence
  Probe
atccgggtgccccctcaatgg

SEQ ID NO: 52861 - DNA, 22 bp, Artificial Sequence
  Probe
atccgggtgccccctcaatggc

SEQ ID NO: 52862 - DNA, 18 bp, Artificial Sequence
  Probe
atccgggtgccccctcac

SEQ ID NO: 52863 - DNA, 19 bp, Artificial Sequence
  Probe
atccgggtgccccctcaca

SEQ ID NO: 52864 - DNA, 20 bp, Artificial Sequence
  Probe
atccgggtgccccctcacag

SEQ ID NO: 52865 - DNA, 21 bp, Artificial Sequence
  Probe
atccgggtgccccctcacagc

SEQ ID NO: 52866 - DNA, 22 bp, Artificial Sequence
  Probe
atccgggtgccccctcacagcc

SEQ ID NO: 52867 - DNA, 19 bp, Artificial Sequence
  Probe
atccgggtgccccctcggg

SEQ ID NO: 52868 - DNA, 18 bp, Artificial Sequence
  Probe
atccgggtgccccctctg

SEQ ID NO: 52869 - DNA, 19 bp, Artificial Sequence
  Probe
atccgggtgccccctctgt

SEQ ID NO: 52870 - DNA, 20 bp, Artificial Sequence
  Probe
atccgggtgccccctctgtg

SEQ ID NO: 52871 - DNA, 21 bp, Artificial Sequence
  Probe
atccgggtgccccctctgtgc

SEQ ID NO: 52872 - DNA, 18 bp, Artificial Sequence
  Probe
atccgggtgccccctctt

SEQ ID NO: 52873 - DNA, 19 bp, Artificial Sequence
  Probe
atccgggtgccccctcttt

SEQ ID NO: 52874 - DNA, 19 bp, Artificial Sequence
  Probe
atcctcacacggggcacaa

SEQ ID NO: 52875 - DNA, 18 bp, Artificial Sequence
  Probe
atcctgccgactacgtca

SEQ ID NO: 52876 - DNA, 21 bp, Artificial Sequence
  Probe
atcctgccgactacgtcatat

SEQ ID NO: 52877 - DNA, 29 bp, Artificial Sequence
  Probe
atcgcataaaacttaaaactttacagtca

SEQ ID NO: 52878 - DNA, 49 bp, Artificial Sequence; identical to SEQ ID NO: 3758
  Probe

SEQ ID NO: 52879 - DNA, 50 bp, Artificial Sequence; identical to SEQ ID NO: 3759
  Probe

SEQ ID NO: 52880 - DNA, 28 bp, Artificial Sequence
  Probe
atctaaagacaggggttaggcctctttt

SEQ ID NO: 52881 - DNA, 33 bp, Artificial Sequence; identical to SEQ ID NO: 387
  Probe

SEQ ID NO: 52882 - DNA, 35 bp, Artificial Sequence; identical to SEQ ID NO: 3765
  Probe

SEQ ID NO: 52883 - DNA, 36 bp, Artificial Sequence; identical to SEQ ID NO: 3766
  Probe

SEQ ID NO: 52884 - DNA, 19 bp, Artificial Sequence
  Probe
atctaaaggtccctggttc

SEQ ID NO: 52885 - DNA, 24 bp, Artificial Sequence
  Probe
atctaaaggtccctggttcgatcc

SEQ ID NO: 52886 - DNA, 29 bp, Artificial Sequence
  Probe
atctgacaacagaggcttacgacccctta

SEQ ID NO: 52887 - DNA, 38 bp, Artificial Sequence; identical to SEQ ID NO: 3792
  Probe

SEQ ID NO: 52888 - DNA, 49 bp, Artificial Sequence; identical to SEQ ID NO: 3796
  Probe

SEQ ID NO: 52889 - DNA, 26 bp, Artificial Sequence
  Probe
atgaaaacctttttccaaggacaaat

SEQ ID NO: 52890 - DNA, 29 bp, Artificial Sequence
  Probe
atgattctcgcttagggtgcgagaggtcc

SEQ ID NO: 52891 - DNA, 30 bp, Artificial Sequence; identical to SEQ ID NO: 17385
  Probe

SEQ ID NO: 52892 - DNA, 31 bp, Artificial Sequence; identical to SEQ ID NO: 3801
  Probe

SEQ ID NO: 52893 - DNA, 32 bp, Artificial Sequence
  Probe
atgattctcgcttagggtgcgagaggtcccgg

SEQ ID NO: 52894 - DNA, 29 bp, Artificial Sequence
  Probe
atgattctcgcttcgggtgcgagaggtcc

SEQ ID NO: 52895 - DNA, 30 bp, Artificial Sequence; identical to SEQ ID NO: 17387
  Probe

SEQ ID NO: 52896 - DNA, 31 bp, Artificial Sequence; identical to SEQ ID NO: 3802
  Probe

SEQ ID NO: 52897 - DNA, 32 bp, Artificial Sequence; identical to SEQ ID NO: 3803
  Probe

SEQ ID NO: 52898 - DNA, 29 bp, Artificial Sequence
  Probe
atgattctcgctttgggtgcgagaggtcc

SEQ ID NO: 52899 - DNA, 30 bp, Artificial Sequence; identical to SEQ ID NO: 12823
  Probe

SEQ ID NO: 52900 - DNA, 31 bp, Artificial Sequence; identical to SEQ ID NO: 3804
  Probe

SEQ ID NO: 52901 - DNA, 32 bp, Artificial Sequence
  Probe
atgattctcgctttgggtgcgagaggtcccgg

SEQ ID NO: 52902 - DNA, 30 bp, Artificial Sequence; identical to SEQ ID NO: 17391
  Probe

SEQ ID NO: 52903 - DNA, 31 bp, Artificial Sequence; identical to SEQ ID NO: 17392
  Probe

SEQ ID NO: 52904 - DNA, 44 bp, Artificial Sequence; identical to SEQ ID NO: 3805
  Probe

SEQ ID NO: 52905 - DNA, 30 bp, Artificial Sequence; identical to SEQ ID NO: 3807
  Probe

SEQ ID NO: 52906 - DNA, 23 bp, Artificial Sequence
  Probe
atgccccaactaaatactaccgt

SEQ ID NO: 52907 - DNA, 24 bp, Artificial Sequence
  Probe
atgccccaactaaatactaccgta

SEQ ID NO: 52908 - DNA, 28 bp, Artificial Sequence
  Probe
atgccccaactaaatactaccgtatggc

SEQ ID NO: 52909 - DNA, 26 bp, Artificial Sequence
  Probe
atgcccccatgtctaacaacatggct

SEQ ID NO: 52910 - DNA, 27 bp, Artificial Sequence
  Probe
atgcccccatgtctaacaacatggctt

SEQ ID NO: 52911 - DNA, 28 bp, Artificial Sequence
  Probe
atgcccccatgtctaacaacatggcttt

SEQ ID NO: 52912 - DNA, 29 bp, Artificial Sequence
  Probe
atgcccccatgtctaacaacatggctttc

SEQ ID NO: 52913 - DNA, 30 bp, Artificial Sequence; identical to SEQ ID NO: 3818
  Probe

SEQ ID NO: 52914 - DNA, 31 bp, Artificial Sequence; identical to SEQ ID NO: 3819
  Probe

SEQ ID NO: 52915 - DNA, 32 bp, Artificial Sequence; identical to SEQ ID NO: 3820
  Probe

SEQ ID NO: 52916 - DNA, 33 bp, Artificial Sequence; identical to SEQ ID NO: 3821
  Probe

SEQ ID NO: 52917 - DNA, 34 bp, Artificial Sequence; identical to SEQ ID NO: 3822
  Probe

SEQ ID NO: 52918 - DNA, 35 bp, Artificial Sequence; identical to SEQ ID NO: 3823
  Probe

SEQ ID NO: 52919 - DNA, 30 bp, Artificial Sequence; identical to SEQ ID NO: 3841
  Probe

SEQ ID NO: 52920 - DNA, 16 bp, Artificial Sequence
  Probe
atggtagagcgctcgc

SEQ ID NO: 52921 - DNA, 16 bp, Artificial Sequence
  Probe
atggttagcactctgg

SEQ ID NO: 52922 - DNA, 17 bp, Artificial Sequence
  Probe
atggttagcactctgga

SEQ ID NO: 52923 - DNA, 35 bp, Artificial Sequence
  Probe
atggttagcactctggactctgaatccagcgatcc

SEQ ID NO: 52924 - DNA, 39 bp, Artificial Sequence; identical to SEQ ID NO: 17472
  Probe

SEQ ID NO: 52925 - DNA, 40 bp, Artificial Sequence; identical to SEQ ID NO: 28901
  Probe

SEQ ID NO: 52926 - DNA, 39 bp, Artificial Sequence; identical to SEQ ID NO: 28907
  Probe

SEQ ID NO: 52927 - DNA, 40 bp, Artificial Sequence; identical to SEQ ID NO: 28908
  Probe

SEQ ID NO: 52928 - DNA, 26 bp, Artificial Sequence
  Probe
atgtctaacaacatggctttctcaac

SEQ ID NO: 52929 - DNA, 27 bp, Artificial Sequence
  Probe
atgtctaacaacatggctttctcaact

SEQ ID NO: 52930 - DNA, 19 bp, Artificial Sequence
  Probe
atgtttagacgggctcaca

SEQ ID NO: 52931 - DNA, 25 bp, Artificial Sequence
  Probe
atgtttagacgggctcacatcaccc

SEQ ID NO: 52932 - DNA, 26 bp, Artificial Sequence
  Probe
atgtttagacgggctcacatcacccc

SEQ ID NO: 52933 - DNA, 27 bp, Artificial Sequence
  Probe
atgtttagacgggctcacatcacccca

SEQ ID NO: 52934 - DNA, 29 bp, Artificial Sequence
  Probe
atgtttagacgggctcacatcaccccata

SEQ ID NO: 52935 - DNA, 36 bp, Artificial Sequence; identical to SEQ ID NO: 3867
  Probe

SEQ ID NO: 52936 - DNA, 38 bp, Artificial Sequence; identical to SEQ ID NO: 3869
  Probe

SEQ ID NO: 52937 - DNA, 33 bp, Artificial Sequence; identical to SEQ ID NO: 3873
  Probe

SEQ ID NO: 52938 - DNA, 50 bp, Artificial Sequence; identical to SEQ ID NO: 420
  Probe

SEQ ID NO: 52939 - DNA, 18 bp, Artificial Sequence
  Probe
attcccattcttgcgacc

SEQ ID NO: 52940 - DNA, 19 bp, Artificial Sequence
  Probe
attcccattcttgcgaccc

SEQ ID NO: 52941 - DNA, 20 bp, Artificial Sequence
  Probe
attcccattcttgcgacccg

SEQ ID NO: 52942 - DNA, 24 bp, Artificial Sequence
  Probe
attcccattcttgcgacccgggtt

SEQ ID NO: 52943 - DNA, 25 bp, Artificial Sequence
  Probe
attcccattcttgcgacccgggttc

SEQ ID NO: 52944 - DNA, 28 bp, Artificial Sequence
  Probe
attcccattcttgcgacccgggttcgat

SEQ ID NO: 52945 - DNA, 44 bp, Artificial Sequence
  Probe
attcccattcttgcgacccgggttcgattcccgggcggcgcact

SEQ ID NO: 52946 - DNA, 45 bp, Artificial Sequence; identical to SEQ ID NO: 17522
  Probe

SEQ ID NO: 52947 - DNA, 50 bp, Artificial Sequence; identical to SEQ ID NO: 38673
  Probe

SEQ ID NO: 52948 - DNA, 19 bp, Artificial Sequence
  Probe
attcccggccaacgcaagt

SEQ ID NO: 52949 - DNA, 19 bp, Artificial Sequence
  Probe
attcccggccaacgcagtg

SEQ ID NO: 52950 - DNA, 19 bp, Artificial Sequence
  Probe
attcccggcccatgcagca

SEQ ID NO: 52951 - DNA, 33 bp, Artificial Sequence; identical to SEQ ID NO: 3885
  Probe

SEQ ID NO: 52952 - DNA, 37 bp, Artificial Sequence; identical to SEQ ID NO: 3888
  Probe

SEQ ID NO: 52953 - DNA, 38 bp, Artificial Sequence; identical to SEQ ID NO: 3893
  Probe

SEQ ID NO: 52954 - DNA, 19 bp, Artificial Sequence
  Probe
attctcatagtcctagaaa

SEQ ID NO: 52955 - DNA, 30 bp, Artificial Sequence; identical to SEQ ID NO: 17540
  Probe

SEQ ID NO: 52956 - DNA, 38 bp, Artificial Sequence; identical to SEQ ID NO: 3895
  Probe

SEQ ID NO: 52957 - DNA, 39 bp, Artificial Sequence; identical to SEQ ID NO: 3896
  Probe

SEQ ID NO: 52958 - DNA, 40 bp, Artificial Sequence; identical to SEQ ID NO: 3903
  Probe

SEQ ID NO: 52959 - DNA, 43 bp, Artificial Sequence; identical to SEQ ID NO: 3905
  Probe

SEQ ID NO: 52960 - DNA, 44 bp, Artificial Sequence; identical to SEQ ID NO: 3906
  Probe

SEQ ID NO: 52961 - DNA, 34 bp, Artificial Sequence; identical to SEQ ID NO: 3911
  Probe

SEQ ID NO: 52962 - DNA, 45 bp, Artificial Sequence; identical to SEQ ID NO: 3932
  Probe

SEQ ID NO: 52963 - DNA, 29 bp, Artificial Sequence
  Probe
atttcaacttaacttgaccgctctgagct

SEQ ID NO: 52964 - DNA, 26 bp, Artificial Sequence
  Probe
caaaacatcagattgtgaatctgaca

SEQ ID NO: 52965 - DNA, 28 bp, Artificial Sequence
  Probe
caaaacatcagattgtgaatctgacaac

SEQ ID NO: 52966 - DNA, 29 bp, Artificial Sequence
  Probe
caaaacatcagattgtgaatctgacaaca

SEQ ID NO: 52967 - DNA, 45 bp, Artificial Sequence; identical to SEQ ID NO: 435
  Probe

SEQ ID NO: 52968 - DNA, 49 bp, Artificial Sequence; identical to SEQ ID NO: 3955
  Probe

SEQ ID NO: 52969 - DNA, 49 bp, Artificial Sequence; identical to SEQ ID NO: 3957
  Probe

SEQ ID NO: 52970 - DNA, 50 bp, Artificial Sequence; identical to SEQ ID NO: 3958
  Probe

SEQ ID NO: 52971 - DNA, 16 bp, Artificial Sequence
  Probe
caaacccactccacct

SEQ ID NO: 52972 - DNA, 39 bp, Artificial Sequence; identical to SEQ ID NO: 17620
  Probe

SEQ ID NO: 52973 - DNA, 38 bp, Artificial Sequence; identical to SEQ ID NO: 440
  Probe

SEQ ID NO: 52974 - DNA, 50 bp, Artificial Sequence; identical to SEQ ID NO: 442
  Probe

SEQ ID NO: 52975 - DNA, 27 bp, Artificial Sequence
  Probe
caaagcacccaacttacacttaggaga

SEQ ID NO: 52976 - DNA, 31 bp, Artificial Sequence; identical to SEQ ID NO: 3988
  Probe

SEQ ID NO: 52977 - DNA, 21 bp, Artificial Sequence
  Probe
caaatcccggacgagccccct

SEQ ID NO: 52978 - DNA, 22 bp, Artificial Sequence
  Probe
caaatcccggacgagccccctt

SEQ ID NO: 52979 - DNA, 23 bp, Artificial Sequence
  Probe
caaatcccggacgagcccccttt

SEQ ID NO: 52980 - DNA, 22 bp, Artificial Sequence
  Probe
caaatcccggacgagccctcat

SEQ ID NO: 52981 - DNA, 23 bp, Artificial Sequence
  Probe
caaatcccggacgagccctcatt

SEQ ID NO: 52982 - DNA, 21 bp, Artificial Sequence
  Probe
caaatccgggtgccccctcaa

SEQ ID NO: 52983 - DNA, 38 bp, Artificial Sequence; identical to SEQ ID NO: 17648
  Probe

SEQ ID NO: 52984 - DNA, 39 bp, Artificial Sequence; identical to SEQ ID NO: 3994
  Probe

SEQ ID NO: 52985 - DNA, 40 bp, Artificial Sequence; identical to SEQ ID NO: 3995
  Probe

SEQ ID NO: 52986 - DNA, 22 bp, Artificial Sequence
  Probe
caacacctctttacagtgaaat

SEQ ID NO: 52987 - DNA, 30 bp, Artificial Sequence; identical to SEQ ID NO: 4001
  Probe

SEQ ID NO: 52988 - DNA, 31 bp, Artificial Sequence; identical to SEQ ID NO: 4002
  Probe

SEQ ID NO: 52989 - DNA, 32 bp, Artificial Sequence; identical to SEQ ID NO: 4003
  Probe

SEQ ID NO: 52990 - DNA, 24 bp, Artificial Sequence
  Probe
caaccgagcgtccaagctctttcc

SEQ ID NO: 52991 - DNA, 25 bp, Artificial Sequence
  Probe
caaccgagcgtccaagctctttcca

SEQ ID NO: 52992 - DNA, 23 bp, Artificial Sequence
  Probe
caacttaacttgaccgctctgag

SEQ ID NO: 52993 - DNA, 24 bp, Artificial Sequence
  Probe
caacttaacttgaccgctctgagc

SEQ ID NO: 52994 - DNA, 25 bp, Artificial Sequence
  Probe
caacttaacttgaccgctctgagct

SEQ ID NO: 52995 - DNA, 37 bp, Artificial Sequence; identical to SEQ ID NO: 4026
  Probe

SEQ ID NO: 52996 - DNA, 44 bp, Artificial Sequence; identical to SEQ ID NO: 4030
  Probe

SEQ ID NO: 52997 - DNA, 45 bp, Artificial Sequence; identical to SEQ ID NO: 4031
  Probe

SEQ ID NO: 52998 - DNA, 46 bp, Artificial Sequence; identical to SEQ ID NO: 4032
  Probe

SEQ ID NO: 52999 - DNA, 18 bp, Artificial Sequence
  Probe
caagaacagggtttgtta

SEQ ID NO: 53000 - DNA, 19 bp, Artificial Sequence
  Probe
caagaactgctaactcatg

SEQ ID NO: 53001 - DNA, 31 bp, Artificial Sequence; identical to SEQ ID NO: 4039
  Probe

SEQ ID NO: 53002 - DNA, 42 bp, Artificial Sequence; identical to SEQ ID NO: 449
  Probe

SEQ ID NO: 53003 - DNA, 43 bp, Artificial Sequence; identical to SEQ ID NO: 4041
  Probe

SEQ ID NO: 53004 - DNA, 44 bp, Artificial Sequence; identical to SEQ ID NO: 450
  Probe

SEQ ID NO: 53005 - DNA, 45 bp, Artificial Sequence; identical to SEQ ID NO: 451
  Probe

SEQ ID NO: 53006 - DNA, 46 bp, Artificial Sequence; identical to SEQ ID NO: 452
  Probe

SEQ ID NO: 53007 - DNA, 50 bp, Artificial Sequence; identical to SEQ ID NO: 4044
  Probe

SEQ ID NO: 53008 - DNA, 31 bp, Artificial Sequence; identical to SEQ ID NO: 457
  Probe

SEQ ID NO: 53009 - DNA, 19 bp, Artificial Sequence
  Probe
caatggataacgcgtctga

SEQ ID NO: 53010 - DNA, 18 bp, Artificial Sequence
  Probe
caatggatagcgcattgg

SEQ ID NO: 53011 - DNA, 19 bp, Artificial Sequence
  Probe
caatggatagcgcattgga

SEQ ID NO: 53012 - DNA, 39 bp, Artificial Sequence; identical to SEQ ID NO: 4061
  Probe

SEQ ID NO: 53013 - DNA, 50 bp, Artificial Sequence; identical to SEQ ID NO: 462
  Probe

SEQ ID NO: 53014 - DNA, 21 bp, Artificial Sequence
  Probe
cacaagaactgctaactcatg

SEQ ID NO: 53015 - DNA, 50 bp, Artificial Sequence; identical to SEQ ID NO: 466
  Probe

SEQ ID NO: 53016 - DNA, 25 bp, Artificial Sequence
  Probe
cacacccacccaagaacagggtttg

SEQ ID NO: 53017 - DNA, 26 bp, Artificial Sequence
  Probe
cacacccacccaagaacagggtttgt

SEQ ID NO: 53018 - DNA, 27 bp, Artificial Sequence
  Probe
cacacccacccaagaacagggtttgtt

SEQ ID NO: 53019 - DNA, 28 bp, Artificial Sequence
  Probe
cacacccacccaagaacagggtttgtta

SEQ ID NO: 53020 - DNA, 21 bp, Artificial Sequence
  Probe
cacacgcgaaaggtccccggt

SEQ ID NO: 53021 - DNA, 21 bp, Artificial Sequence
  Probe
cacatcaccccataaacaaat

SEQ ID NO: 53022 - DNA, 19 bp, Artificial Sequence
  Probe
cacgcgaaaggtccccggt

SEQ ID NO: 53023 - DNA, 40 bp, Artificial Sequence; identical to SEQ ID NO: 4155
  Probe

SEQ ID NO: 53024 - DNA, 28 bp, Artificial Sequence
  Probe
cactctggactctgaatccagcgatccg

SEQ ID NO: 53025 - DNA, 27 bp, Artificial Sequence
  Probe
cactctggactttgaatccagcgatcc

SEQ ID NO: 53026 - DNA, 27 bp, Artificial Sequence
  Probe
cactgtaaagctaacttagcattaacc

SEQ ID NO: 53027 - DNA, 29 bp, Artificial Sequence
  Probe
cactgtaaagctaacttagcattaacctt

SEQ ID NO: 53028 - DNA, 31 bp, Artificial Sequence; identical to SEQ ID NO: 494
  Probe

SEQ ID NO: 53029 - DNA, 33 bp, Artificial Sequence; identical to SEQ ID NO: 4180
  Probe

SEQ ID NO: 53030 - DNA, 35 bp, Artificial Sequence; identical to SEQ ID NO: 497
  Probe

SEQ ID NO: 53031 - DNA, 36 bp, Artificial Sequence; identical to SEQ ID NO: 498
  Probe

SEQ ID NO: 53032 - DNA, 37 bp, Artificial Sequence; identical to SEQ ID NO: 4181
  Probe

SEQ ID NO: 53033 - DNA, 38 bp, Artificial Sequence; identical to SEQ ID NO: 17810
  Probe

SEQ ID NO: 53034 - DNA, 39 bp, Artificial Sequence; identical to SEQ ID NO: 499
  Probe

SEQ ID NO: 53035 - DNA, 40 bp, Artificial Sequence; identical to SEQ ID NO: 4182
  Probe

SEQ ID NO: 53036 - DNA, 43 bp, Artificial Sequence; identical to SEQ ID NO: 501
  Probe

SEQ ID NO: 53037 - DNA, 50 bp, Artificial Sequence; identical to SEQ ID NO: 502
  Probe

SEQ ID NO: 53038 - DNA, 38 bp, Artificial Sequence; identical to SEQ ID NO: 4203
  Probe

SEQ ID NO: 53039 - DNA, 39 bp, Artificial Sequence; identical to SEQ ID NO: 4204
  Probe

SEQ ID NO: 53040 - DNA, 16 bp, Artificial Sequence
  Probe
cagaagattccaggtt

SEQ ID NO: 53041 - DNA, 16 bp, Artificial Sequence
  Probe
cagaagattctaggtt

SEQ ID NO: 53042 - DNA, 37 bp, Artificial Sequence; identical to SEQ ID NO: 4213
  Probe

SEQ ID NO: 53043 - DNA, 16 bp, Artificial Sequence
  Probe
cagaagattgagggtt

SEQ ID NO: 53044 - DNA, 16 bp, Artificial Sequence
  Probe
cagaagattgcaggtt

SEQ ID NO: 53045 - DNA, 50 bp, Artificial Sequence; identical to SEQ ID NO: 514
  Probe

SEQ ID NO: 53046 - DNA, 21 bp, Artificial Sequence
  Probe
cagagaatagtttaaattaga

SEQ ID NO: 53047 - DNA, 25 bp, Artificial Sequence
  Probe
cagagaatagtttaaattagaatct

SEQ ID NO: 53048 - DNA, 26 bp, Artificial Sequence
  Probe
cagagaatagtttaaattagaatctt

SEQ ID NO: 53049 - DNA, 27 bp, Artificial Sequence
  Probe
cagagaatagtttaaattagaatctta

SEQ ID NO: 53050 - DNA, 29 bp, Artificial Sequence
  Probe
cagagaatagtttaaattagaatcttagc

SEQ ID NO: 53051 - DNA, 31 bp, Artificial Sequence; identical to SEQ ID NO: 520
  Probe

SEQ ID NO: 53052 - DNA, 33 bp, Artificial Sequence; identical to SEQ ID NO: 522
  Probe

SEQ ID NO: 53053 - DNA, 34 bp, Artificial Sequence; identical to SEQ ID NO: 523
  Probe

SEQ ID NO: 53054 - DNA, 35 bp, Artificial Sequence; identical to SEQ ID NO: 4232
  Probe

SEQ ID NO: 53055 - DNA, 36 bp, Artificial Sequence; identical to SEQ ID NO: 4233
  Probe

SEQ ID NO: 53056 - DNA, 37 bp, Artificial Sequence; identical to SEQ ID NO: 4234
  Probe

SEQ ID NO: 53057 - DNA, 38 bp, Artificial Sequence; identical to SEQ ID NO: 4235
  Probe

SEQ ID NO: 53058 - DNA, 39 bp, Artificial Sequence; identical to SEQ ID NO: 4236
  Probe

SEQ ID NO: 53059 - DNA, 40 bp, Artificial Sequence; identical to SEQ ID NO: 524
  Probe

SEQ ID NO: 53060 - DNA, 43 bp, Artificial Sequence; identical to SEQ ID NO: 525
  Probe

SEQ ID NO: 53061 - DNA, 44 bp, Artificial Sequence; identical to SEQ ID NO: 4237
  Probe

SEQ ID NO: 53062 - DNA, 45 bp, Artificial Sequence; identical to SEQ ID NO: 4238
  Probe

SEQ ID NO: 53063 - DNA, 46 bp, Artificial Sequence; identical to SEQ ID NO: 4239
  Probe

SEQ ID NO: 53064 - DNA, 50 bp, Artificial Sequence; identical to SEQ ID NO: 526
  Probe

SEQ ID NO: 53065 - DNA, 27 bp, Artificial Sequence
  Probe
cagagtggggttttgcagtccttagct

SEQ ID NO: 53066 - DNA, 16 bp, Artificial Sequence
  Probe
cagagtgtagcttaac

SEQ ID NO: 53067 - DNA, 17 bp, Artificial Sequence
  Probe
cagagtgtagcttaaca

SEQ ID NO: 53068 - DNA, 19 bp, Artificial Sequence
  Probe
cagagtgtagcttaacaca

SEQ ID NO: 53069 - DNA, 21 bp, Artificial Sequence
  Probe
cagagtgtagcttaacacaaa

SEQ ID NO: 53070 - DNA, 23 bp, Artificial Sequence
  Probe
cagagtgtagcttaacacaaagc

SEQ ID NO: 53071 - DNA, 24 bp, Artificial Sequence
  Probe
cagagtgtagcttaacacaaagca

SEQ ID NO: 53072 - DNA, 25 bp, Artificial Sequence
  Probe
cagagtgtagcttaacacaaagcac

SEQ ID NO: 53073 - DNA, 26 bp, Artificial Sequence
  Probe
cagagtgtagcttaacacaaagcacc

SEQ ID NO: 53074 - DNA, 27 bp, Artificial Sequence
  Probe
cagagtgtagcttaacacaaagcaccc

SEQ ID NO: 53075 - DNA, 28 bp, Artificial Sequence
  Probe
cagagtgtagcttaacacaaagcaccca

SEQ ID NO: 53076 - DNA, 29 bp, Artificial Sequence
  Probe
cagagtgtagcttaacacaaagcacccaa

SEQ ID NO: 53077 - DNA, 30 bp, Artificial Sequence; identical to SEQ ID NO: 4262
  Probe

SEQ ID NO: 53078 - DNA, 31 bp, Artificial Sequence; identical to SEQ ID NO: 4263
  Probe

SEQ ID NO: 53079 - DNA, 32 bp, Artificial Sequence; identical to SEQ ID NO: 4264
  Probe

SEQ ID NO: 53080 - DNA, 33 bp, Artificial Sequence; identical to SEQ ID NO: 4265
  Probe

SEQ ID NO: 53081 - DNA, 34 bp, Artificial Sequence; identical to SEQ ID NO: 4266
  Probe

SEQ ID NO: 53082 - DNA, 35 bp, Artificial Sequence; identical to SEQ ID NO: 4267
  Probe

SEQ ID NO: 53083 - DNA, 36 bp, Artificial Sequence; identical to SEQ ID NO: 4268
  Probe

SEQ ID NO: 53084 - DNA, 37 bp, Artificial Sequence; identical to SEQ ID NO: 4269
  Probe

SEQ ID NO: 53085 - DNA, 38 bp, Artificial Sequence; identical to SEQ ID NO: 4270
  Probe

SEQ ID NO: 53086 - DNA, 39 bp, Artificial Sequence; identical to SEQ ID NO: 4271
  Probe

SEQ ID NO: 53087 - DNA, 40 bp, Artificial Sequence; identical to SEQ ID NO: 4272
  Probe

SEQ ID NO: 53088 - DNA, 41 bp, Artificial Sequence; identical to SEQ ID NO: 4273
  Probe

SEQ ID NO: 53089 - DNA, 42 bp, Artificial Sequence; identical to SEQ ID NO: 4274
  Probe

SEQ ID NO: 53090 - DNA, 43 bp, Artificial Sequence; identical to SEQ ID NO: 4275
  Probe

SEQ ID NO: 53091 - DNA, 44 bp, Artificial Sequence; identical to SEQ ID NO: 4276
  Probe

SEQ ID NO: 53092 - DNA, 45 bp, Artificial Sequence; identical to SEQ ID NO: 4277
  Probe

SEQ ID NO: 53093 - DNA, 46 bp, Artificial Sequence; identical to SEQ ID NO: 4278
  Probe

SEQ ID NO: 53094 - DNA, 50 bp, Artificial Sequence; identical to SEQ ID NO: 4281
  Probe

SEQ ID NO: 53095 - DNA, 50 bp, Artificial Sequence; identical to SEQ ID NO: 4284
  Probe

SEQ ID NO: 53096 - DNA, 27 bp, Artificial Sequence
  Probe
cagcctccggagctggggattgtgggt

SEQ ID NO: 53097 - DNA, 26 bp, Artificial Sequence
  Probe
cagctaaataagctatcgggcccata

SEQ ID NO: 53098 - DNA, 27 bp, Artificial Sequence
  Probe
cagctaaataagctatcgggcccatac

SEQ ID NO: 53099 - DNA, 31 bp, Artificial Sequence; identical to SEQ ID NO: 4307
  Probe

SEQ ID NO: 53100 - DNA, 35 bp, Artificial Sequence; identical to SEQ ID NO: 4311
  Probe

SEQ ID NO: 53101 - DNA, 36 bp, Artificial Sequence; identical to SEQ ID NO: 4312
  Probe

SEQ ID NO: 53102 - DNA, 37 bp, Artificial Sequence; identical to SEQ ID NO: 4313
  Probe

SEQ ID NO: 53103 - DNA, 38 bp, Artificial Sequence; identical to SEQ ID NO: 17944
  Probe

SEQ ID NO: 53104 - DNA, 39 bp, Artificial Sequence; identical to SEQ ID NO: 4314
  Probe

SEQ ID NO: 53105 - DNA, 40 bp, Artificial Sequence; identical to SEQ ID NO: 4315
  Probe

SEQ ID NO: 53106 - DNA, 44 bp, Artificial Sequence; identical to SEQ ID NO: 4318
  Probe

SEQ ID NO: 53107 - DNA, 50 bp, Artificial Sequence; identical to SEQ ID NO: 532
  Probe

SEQ ID NO: 53108 - DNA, 15 bp, Artificial Sequence
  Probe
cagctatccattggt

SEQ ID NO: 53109 - DNA, 48 bp, Artificial Sequence
  Probe
cagctatccattggtcttaggccccaaaaattttggtgcaactccaaa

SEQ ID NO: 53110 - DNA, 18 bp, Artificial Sequence
  Probe
cagctttggggggttcga

SEQ ID NO: 53111 - DNA, 29 bp, Artificial Sequence
  Probe
cagctttggggggttcgattccttccttt

SEQ ID NO: 53112 - DNA, 33 bp, Artificial Sequence; identical to SEQ ID NO: 4334
  Probe

SEQ ID NO: 53113 - DNA, 34 bp, Artificial Sequence; identical to SEQ ID NO: 4335
  Probe

SEQ ID NO: 53114 - DNA, 35 bp, Artificial Sequence; identical to SEQ ID NO: 4336
  Probe

SEQ ID NO: 53115 - DNA, 36 bp, Artificial Sequence; identical to SEQ ID NO: 4337
  Probe

SEQ ID NO: 53116 - DNA, 33 bp, Artificial Sequence; identical to SEQ ID NO: 4345
  Probe

SEQ ID NO: 53117 - DNA, 24 bp, Artificial Sequence
  Probe
cagtcagaggttcaattcctcttc

SEQ ID NO: 53118 - DNA, 25 bp, Artificial Sequence
  Probe
cagtcagaggttcaattcctcttct

SEQ ID NO: 53119 - DNA, 26 bp, Artificial Sequence
  Probe
cagtcagaggttcaattcctcttctt

SEQ ID NO: 53120 - DNA, 27 bp, Artificial Sequence
  Probe
cagtcagaggttcaattcctcttctta

SEQ ID NO: 53121 - DNA, 30 bp, Artificial Sequence; identical to SEQ ID NO: 4358
  Probe

SEQ ID NO: 53122 - DNA, 33 bp, Artificial Sequence; identical to SEQ ID NO: 4360
  Probe

SEQ ID NO: 53123 - DNA, 19 bp, Artificial Sequence
  Probe
cagtcggtagagcatcaga

SEQ ID NO: 53124 - DNA, 19 bp, Artificial Sequence
  Probe
cagtcggtagagcatggga

SEQ ID NO: 53125 - DNA, 20 bp, Artificial Sequence
  Probe
cagtcggtagagcatgggac

SEQ ID NO: 53126 - DNA, 30 bp, Artificial Sequence; identical to SEQ ID NO: 25154
  Probe

SEQ ID NO: 53127 - DNA, 37 bp, Artificial Sequence; identical to SEQ ID NO: 4370
  Probe

SEQ ID NO: 53128 - DNA, 42 bp, Artificial Sequence; identical to SEQ ID NO: 18017
  Probe

SEQ ID NO: 53129 - DNA, 27 bp, Artificial Sequence
  Probe
cagtctcataatctgaaggtcctgagt

SEQ ID NO: 53130 - DNA, 24 bp, Artificial Sequence
  Probe
cagtctcataatctgaaggtcgtg

SEQ ID NO: 53131 - DNA, 29 bp, Artificial Sequence
  Probe
cagtctcataatctgaaggtcgtgagttc

SEQ ID NO: 53132 - DNA, 44 bp, Artificial Sequence; identical to SEQ ID NO: 4374
  Probe

SEQ ID NO: 53133 - DNA, 19 bp, Artificial Sequence
  Probe
cagtggtagaattctcgcc

SEQ ID NO: 53134 - DNA, 20 bp, Artificial Sequence
  Probe
cagtggtagaattctcgcct

SEQ ID NO: 53135 - DNA, 21 bp, Artificial Sequence
  Probe
cagtggtagaattctcgcctg

SEQ ID NO: 53136 - DNA, 22 bp, Artificial Sequence
  Probe
cagtggtagaattctcgcctgc

SEQ ID NO: 53137 - DNA, 23 bp, Artificial Sequence
  Probe
cagtggtagaattctcgcctgcc

SEQ ID NO: 53138 - DNA, 36 bp, Artificial Sequence; identical to SEQ ID NO: 4381
  Probe

SEQ ID NO: 53139 - DNA, 45 bp, Artificial Sequence; identical to SEQ ID NO: 29643
  Probe

SEQ ID NO: 53140 - DNA, 50 bp, Artificial Sequence; identical to SEQ ID NO: 538
  Probe

SEQ ID NO: 53141 - DNA, 23 bp, Artificial Sequence
  Probe
cataacccagaggtcgatggatc

SEQ ID NO: 53142 - DNA, 24 bp, Artificial Sequence
  Probe
cataacccagaggtcgatggatcg

SEQ ID NO: 53143 - DNA, 39 bp, Artificial Sequence
  Probe
cataacccagaggtcgatggatcgaaaccatcctctgct

SEQ ID NO: 53144 - DNA, 43 bp, Artificial Sequence; identical to SEQ ID NO: 4391
  Probe

SEQ ID NO: 53145 - DNA, 42 bp, Artificial Sequence; identical to SEQ ID NO: 18044
  Probe

SEQ ID NO: 53146 - DNA, 43 bp, Artificial Sequence
  Probe
cataacccagaggtcgatggatcgaaaccatcctctgctatcg

SEQ ID NO: 53147 - DNA, 42 bp, Artificial Sequence
  Probe
cataacccagaggtcgatggatcgaaaccatcctctgctatt

SEQ ID NO: 53148 - DNA, 43 bp, Artificial Sequence
  Probe
cataacccagaggtcgatggatcgaaaccatcctctgctattt

SEQ ID NO: 53149 - DNA, 21 bp, Artificial Sequence
  Probe
cataatctgaaggtcctgagt

SEQ ID NO: 53150 - DNA, 41 bp, Artificial Sequence; identical to SEQ ID NO: 4397
  Probe

SEQ ID NO: 53151 - DNA, 40 bp, Artificial Sequence; identical to SEQ ID NO: 18062
  Probe

SEQ ID NO: 53152 - DNA, 50 bp, Artificial Sequence; identical to SEQ ID NO: 4406
  Probe

SEQ ID NO: 53153 - DNA, 50 bp, Artificial Sequence; identical to SEQ ID NO: 4419
  Probe

SEQ ID NO: 53154 - DNA, 19 bp, Artificial Sequence
  Probe
catgcaagattcccattct

SEQ ID NO: 53155 - DNA, 27 bp, Artificial Sequence
  Probe
catgcaagattcccattcttgcgaccc

SEQ ID NO: 53156 - DNA, 32 bp, Artificial Sequence; identical to SEQ ID NO: 18083
  Probe

SEQ ID NO: 53157 - DNA, 33 bp, Artificial Sequence; identical to SEQ ID NO: 18084
  Probe

SEQ ID NO: 53158 - DNA, 21 bp, Artificial Sequence
  Probe
catgcccccatgtctaacaac

SEQ ID NO: 53159 - DNA, 26 bp, Artificial Sequence
  Probe
catgcccccatgtctaacaacatggc

SEQ ID NO: 53160 - DNA, 27 bp, Artificial Sequence
  Probe
catgcccccatgtctaacaacatggct

SEQ ID NO: 53161 - DNA, 28 bp, Artificial Sequence
  Probe
catgcccccatgtctaacaacatggctt

SEQ ID NO: 53162 - DNA, 29 bp, Artificial Sequence
  Probe
catgcccccatgtctaacaacatggcttt

SEQ ID NO: 53163 - DNA, 30 bp, Artificial Sequence; identical to SEQ ID NO: 4433
  Probe

SEQ ID NO: 53164 - DNA, 31 bp, Artificial Sequence; identical to SEQ ID NO: 4434
  Probe

SEQ ID NO: 53165 - DNA, 32 bp, Artificial Sequence; identical to SEQ ID NO: 4435
  Probe

SEQ ID NO: 53166 - DNA, 33 bp, Artificial Sequence; identical to SEQ ID NO: 4436
  Probe

SEQ ID NO: 53167 - DNA, 34 bp, Artificial Sequence; identical to SEQ ID NO: 4437
  Probe

SEQ ID NO: 53168 - DNA, 35 bp, Artificial Sequence; identical to SEQ ID NO: 4438
  Probe

SEQ ID NO: 53169 - DNA, 36 bp, Artificial Sequence; identical to SEQ ID NO: 4439
  Probe

SEQ ID NO: 53170 - DNA, 37 bp, Artificial Sequence; identical to SEQ ID NO: 18101
  Probe

SEQ ID NO: 53171 - DNA, 38 bp, Artificial Sequence; identical to SEQ ID NO: 18102
  Probe

SEQ ID NO: 53172 - DNA, 39 bp, Artificial Sequence; identical to SEQ ID NO: 18103
  Probe

SEQ ID NO: 53173 - DNA, 31 bp, Artificial Sequence; identical to SEQ ID NO: 18105
  Probe

SEQ ID NO: 53174 - DNA, 33 bp, Artificial Sequence; identical to SEQ ID NO: 4440
  Probe

SEQ ID NO: 53175 - DNA, 32 bp, Artificial Sequence; identical to SEQ ID NO: 4447
  Probe

SEQ ID NO: 53176 - DNA, 38 bp, Artificial Sequence; identical to SEQ ID NO: 18118
  Probe

SEQ ID NO: 53177 - DNA, 39 bp, Artificial Sequence; identical to SEQ ID NO: 4450
  Probe

SEQ ID NO: 53178 - DNA, 40 bp, Artificial Sequence; identical to SEQ ID NO: 4451
  Probe

SEQ ID NO: 53179 - DNA, 42 bp, Artificial Sequence; identical to SEQ ID NO: 46375
  Probe

SEQ ID NO: 53180 - DNA, 40 bp, Artificial Sequence; identical to SEQ ID NO: 4455
  Probe

SEQ ID NO: 53181 - DNA, 35 bp, Artificial Sequence; identical to SEQ ID NO: 4461
  Probe

SEQ ID NO: 53182 - DNA, 30 bp, Artificial Sequence; identical to SEQ ID NO: 4462
  Probe

SEQ ID NO: 53183 - DNA, 31 bp, Artificial Sequence; identical to SEQ ID NO: 4463
  Probe

SEQ ID NO: 53184 - DNA, 32 bp, Artificial Sequence; identical to SEQ ID NO: 4464
  Probe

SEQ ID NO: 53185 - DNA, 34 bp, Artificial Sequence; identical to SEQ ID NO: 4466
  Probe

SEQ ID NO: 53186 - DNA, 50 bp, Artificial Sequence; identical to SEQ ID NO: 18141
  Probe

SEQ ID NO: 53187 - DNA, 30 bp, Artificial Sequence; identical to SEQ ID NO: 25171
  Probe

SEQ ID NO: 53188 - DNA, 27 bp, Artificial Sequence
  Probe
ccaaaacatcagattgtgaatctgaca

SEQ ID NO: 53189 - DNA, 29 bp, Artificial Sequence
  Probe
ccaaaacatcagattgtgaatctgacaac

SEQ ID NO: 53190 - DNA, 30 bp, Artificial Sequence; identical to SEQ ID NO: 4473
  Probe

SEQ ID NO: 53191 - DNA, 31 bp, Artificial Sequence; identical to SEQ ID NO: 4474
  Probe

SEQ ID NO: 53192 - DNA, 32 bp, Artificial Sequence; identical to SEQ ID NO: 4475
  Probe

SEQ ID NO: 53193 - DNA, 36 bp, Artificial Sequence; identical to SEQ ID NO: 4479
  Probe

SEQ ID NO: 53194 - DNA, 50 bp, Artificial Sequence; identical to SEQ ID NO: 4482
  Probe

SEQ ID NO: 53195 - DNA, 17 bp, Artificial Sequence
  Probe
ccaaacccactccacct

SEQ ID NO: 53196 - DNA, 38 bp, Artificial Sequence; identical to SEQ ID NO: 18167
  Probe

SEQ ID NO: 53197 - DNA, 39 bp, Artificial Sequence
  Probe
ccaaagacaccccccacagtttatgtagcttacctcctc

SEQ ID NO: 53198 - DNA, 23 bp, Artificial Sequence
  Probe
ccaacacctctttacagtgaaat

SEQ ID NO: 53199 - DNA, 45 bp, Artificial Sequence; identical to SEQ ID NO: 4506
  Probe

SEQ ID NO: 53200 - DNA, 46 bp, Artificial Sequence; identical to SEQ ID NO: 4507
  Probe

SEQ ID NO: 53201 - DNA, 48 bp, Artificial Sequence; identical to SEQ ID NO: 4508
  Probe

SEQ ID NO: 53202 - DNA, 49 bp, Artificial Sequence; identical to SEQ ID NO: 4509
  Probe

SEQ ID NO: 53203 - DNA, 50 bp, Artificial Sequence; identical to SEQ ID NO: 4510
  Probe

SEQ ID NO: 53204 - DNA, 19 bp, Artificial Sequence
  Probe
ccaagaacagggtttgtta

SEQ ID NO: 53205 - DNA, 21 bp, Artificial Sequence
  Probe
ccaagcagttgacccgggttc

SEQ ID NO: 53206 - DNA, 41 bp, Artificial Sequence; identical to SEQ ID NO: 18192
  Probe

SEQ ID NO: 53207 - DNA, 38 bp, Artificial Sequence; identical to SEQ ID NO: 4520
  Probe

SEQ ID NO: 53208 - DNA, 39 bp, Artificial Sequence; identical to SEQ ID NO: 4521
  Probe

SEQ ID NO: 53209 - DNA, 40 bp, Artificial Sequence; identical to SEQ ID NO: 4522
  Probe

SEQ ID NO: 53210 - DNA, 26 bp, Artificial Sequence
  Probe
ccacacccacccaagaacagggtttg

SEQ ID NO: 53211 - DNA, 27 bp, Artificial Sequence
  Probe
ccacacccacccaagaacagggtttgt

SEQ ID NO: 53212 - DNA, 28 bp, Artificial Sequence
  Probe
ccacacccacccaagaacagggtttgtt

SEQ ID NO: 53213 - DNA, 29 bp, Artificial Sequence
  Probe
ccacacccacccaagaacagggtttgtta

SEQ ID NO: 53214 - DNA, 25 bp, Artificial Sequence
  Probe
ccacatggtctagcggttaggattc

SEQ ID NO: 53215 - DNA, 26 bp, Artificial Sequence
  Probe
ccacatggtctagcggttaggattcc

SEQ ID NO: 53216 - DNA, 23 bp, Artificial Sequence
  Probe
ccacccaagaacagggtttgtta

SEQ ID NO: 53217 - DNA, 26 bp, Artificial Sequence
  Probe
ccacccaagaacagggtttgttaaga

SEQ ID NO: 53218 - DNA, 21 bp, Artificial Sequence
  Probe
ccacgcgggaggcccgggttc

SEQ ID NO: 53219 - DNA, 22 bp, Artificial Sequence
  Probe
ccacgcgggaggcccgggttcg

SEQ ID NO: 53220 - DNA, 24 bp, Artificial Sequence
  Probe
ccacgcgggaggcccgggttcgat

SEQ ID NO: 53221 - DNA, 38 bp, Artificial Sequence; identical to SEQ ID NO: 18234
  Probe

SEQ ID NO: 53222 - DNA, 41 bp, Artificial Sequence; identical to SEQ ID NO: 4534
  Probe

SEQ ID NO: 53223 - DNA, 22 bp, Artificial Sequence
  Probe
ccacgcgggaggcccgggtttg

SEQ ID NO: 53224 - DNA, 50 bp, Artificial Sequence; identical to SEQ ID NO: 18241
  Probe

SEQ ID NO: 53225 - DNA, 33 bp, Artificial Sequence; identical to SEQ ID NO: 46473
  Probe

SEQ ID NO: 53226 - DNA, 29 bp, Artificial Sequence
  Probe
ccagagtgtagcttaacacaaagcaccca

SEQ ID NO: 53227 - DNA, 46 bp, Artificial Sequence; identical to SEQ ID NO: 4548
  Probe

SEQ ID NO: 53228 - DNA, 35 bp, Artificial Sequence; identical to SEQ ID NO: 4558
  Probe

SEQ ID NO: 53229 - DNA, 37 bp, Artificial Sequence; identical to SEQ ID NO: 4560
  Probe

SEQ ID NO: 53230 - DNA, 38 bp, Artificial Sequence; identical to SEQ ID NO: 18270
  Probe

SEQ ID NO: 53231 - DNA, 45 bp, Artificial Sequence; identical to SEQ ID NO: 4573
  Probe

SEQ ID NO: 53232 - DNA, 50 bp, Artificial Sequence; identical to SEQ ID NO: 4574
  Probe

SEQ ID NO: 53233 - DNA, 44 bp, Artificial Sequence; identical to SEQ ID NO: 4575
  Probe

SEQ ID NO: 53234 - DNA, 43 bp, Artificial Sequence
  Probe
ccataacccagaggtcgatggatcgaaaccatcctctgctatc

SEQ ID NO: 53235 - DNA, 44 bp, Artificial Sequence
  Probe
ccataacccagaggtcgatggatcgaaaccatcctctgctatcg

SEQ ID NO: 53236 - DNA, 44 bp, Artificial Sequence
  Probe
ccataacccagaggtcgatggatcgaaaccatcctctgctattt

SEQ ID NO: 53237 - DNA, 42 bp, Artificial Sequence; identical to SEQ ID NO: 4578
  Probe

SEQ ID NO: 53238 - DNA, 27 bp, Artificial Sequence
  Probe
ccatagtgtagtggttatcacgtctgc

SEQ ID NO: 53239 - DNA, 28 bp, Artificial Sequence
  Probe
ccatatggtctagcggttaggattcctg

SEQ ID NO: 53240 - DNA, 29 bp, Artificial Sequence
  Probe
ccatatggtctagcggttaggattcctgg

SEQ ID NO: 53241 - DNA, 40 bp, Artificial Sequence; identical to SEQ ID NO: 4586
  Probe

SEQ ID NO: 53242 - DNA, 41 bp, Artificial Sequence; identical to SEQ ID NO: 4587
  Probe

SEQ ID NO: 53243 - DNA, 50 bp, Artificial Sequence; identical to SEQ ID NO: 29872
  Probe

SEQ ID NO: 53244 - DNA, 28 bp, Artificial Sequence
  Probe
cccaaaaattttggtgcaactccaaata

SEQ ID NO: 53245 - DNA, 37 bp, Artificial Sequence; identical to SEQ ID NO: 4594
  Probe

SEQ ID NO: 53246 - DNA, 18 bp, Artificial Sequence
  Probe
cccaaacccactccacct

SEQ ID NO: 53247 - DNA, 46 bp, Artificial Sequence; identical to SEQ ID NO: 4610
  Probe

SEQ ID NO: 53248 - DNA, 49 bp, Artificial Sequence; identical to SEQ ID NO: 4612
  Probe

SEQ ID NO: 53249 - DNA, 50 bp, Artificial Sequence; identical to SEQ ID NO: 4613
  Probe

SEQ ID NO: 53250 - DNA, 17 bp, Artificial Sequence
  Probe
cccaagaacagggtttg

SEQ ID NO: 53251 - DNA, 20 bp, Artificial Sequence
  Probe
cccaagaacagggtttgtta

SEQ ID NO: 53252 - DNA, 26 bp, Artificial Sequence
  Probe
cccacacccacccaagaacagggttt

SEQ ID NO: 53253 - DNA, 27 bp, Artificial Sequence
  Probe
cccacacccacccaagaacagggtttg

SEQ ID NO: 53254 - DNA, 28 bp, Artificial Sequence
  Probe
cccacacccacccaagaacagggtttgt

SEQ ID NO: 53255 - DNA, 29 bp, Artificial Sequence
  Probe
cccacacccacccaagaacagggtttgtt

SEQ ID NO: 53256 - DNA, 30 bp, Artificial Sequence; identical to SEQ ID NO: 4619
  Probe

SEQ ID NO: 53257 - DNA, 31 bp, Artificial Sequence; identical to SEQ ID NO: 4620
  Probe

SEQ ID NO: 53258 - DNA, 33 bp, Artificial Sequence; identical to SEQ ID NO: 18359
  Probe

SEQ ID NO: 53259 - DNA, 25 bp, Artificial Sequence
  Probe
cccacatggtctagcggttaggatt

SEQ ID NO: 53260 - DNA, 27 bp, Artificial Sequence
  Probe
cccacatggtctagcggttaggattcc

SEQ ID NO: 53261 - DNA, 29 bp, Artificial Sequence
  Probe
cccacatggtctagcggttaggattcctg

SEQ ID NO: 53262 - DNA, 30 bp, Artificial Sequence; identical to SEQ ID NO: 9679
  Probe

SEQ ID NO: 53263 - DNA, 38 bp, Artificial Sequence; identical to SEQ ID NO: 18368
  Probe

SEQ ID NO: 53264 - DNA, 39 bp, Artificial Sequence
  Probe
cccacatggtctagcggttaggattcctggttttcaccc

SEQ ID NO: 53265 - DNA, 20 bp, Artificial Sequence
  Probe
cccacccaagaacagggttt

SEQ ID NO: 53266 - DNA, 21 bp, Artificial Sequence
  Probe
cccacccaagaacagggtttg

SEQ ID NO: 53267 - DNA, 22 bp, Artificial Sequence
  Probe
cccacccaagaacagggtttgt

SEQ ID NO: 53268 - DNA, 23 bp, Artificial Sequence
  Probe
cccacccaagaacagggtttgtt

SEQ ID NO: 53269 - DNA, 24 bp, Artificial Sequence
  Probe
cccacccaagaacagggtttgtta

SEQ ID NO: 53270 - DNA, 25 bp, Artificial Sequence
  Probe
cccacccaagaacagggtttgttaa

SEQ ID NO: 53271 - DNA, 26 bp, Artificial Sequence
  Probe
cccacccaagaacagggtttgttaag

SEQ ID NO: 53272 - DNA, 27 bp, Artificial Sequence
  Probe
cccacccaagaacagggtttgttaaga

SEQ ID NO: 53273 - DNA, 45 bp, Artificial Sequence; identical to SEQ ID NO: 18409
  Probe

SEQ ID NO: 53274 - DNA, 44 bp, Artificial Sequence; identical to SEQ ID NO: 46593
  Probe

SEQ ID NO: 53275 - DNA, 43 bp, Artificial Sequence; identical to SEQ ID NO: 4644
  Probe

SEQ ID NO: 53276 - DNA, 38 bp, Artificial Sequence; identical to SEQ ID NO: 18418
  Probe

SEQ ID NO: 53277 - DNA, 30 bp, Artificial Sequence; identical to SEQ ID NO: 4650
  Probe

SEQ ID NO: 53278 - DNA, 21 bp, Artificial Sequence
  Probe
cccattcttgcgacccgggtt

SEQ ID NO: 53279 - DNA, 22 bp, Artificial Sequence
  Probe
cccattcttgcgacccgggttc

SEQ ID NO: 53280 - DNA, 23 bp, Artificial Sequence
  Probe
cccattcttgcgacccgggttcg

SEQ ID NO: 53281 - DNA, 24 bp, Artificial Sequence
  Probe
cccattcttgcgacccgggttcga

SEQ ID NO: 53282 - DNA, 25 bp, Artificial Sequence
  Probe
cccattcttgcgacccgggttcgat

SEQ ID NO: 53283 - DNA, 26 bp, Artificial Sequence
  Probe
cccattcttgcgacccgggttcgatt

SEQ ID NO: 53284 - DNA, 27 bp, Artificial Sequence
  Probe
cccattcttgcgacccgggttcgattc

SEQ ID NO: 53285 - DNA, 28 bp, Artificial Sequence
  Probe
cccattcttgcgacccgggttcgattcc

SEQ ID NO: 53286 - DNA, 36 bp, Artificial Sequence; identical to SEQ ID NO: 4652
  Probe

SEQ ID NO: 53287 - DNA, 38 bp, Artificial Sequence; identical to SEQ ID NO: 4653
  Probe

SEQ ID NO: 53288 - DNA, 41 bp, Artificial Sequence; identical to SEQ ID NO: 4655
  Probe

SEQ ID NO: 53289 - DNA, 42 bp, Artificial Sequence; identical to SEQ ID NO: 4656
  Probe

SEQ ID NO: 53290 - DNA, 43 bp, Artificial Sequence; identical to SEQ ID NO: 4657
  Probe

SEQ ID NO: 53291 - DNA, 44 bp, Artificial Sequence; identical to SEQ ID NO: 4658
  Probe

SEQ ID NO: 53292 - DNA, 45 bp, Artificial Sequence; identical to SEQ ID NO: 4659
  Probe

SEQ ID NO: 53293 - DNA, 46 bp, Artificial Sequence
  Probe
cccattcttgcgacccgggttcgattcccgggcggcgcacttagtt

SEQ ID NO: 53294 - DNA, 49 bp, Artificial Sequence; identical to SEQ ID NO: 4660
  Probe

SEQ ID NO: 53295 - DNA, 50 bp, Artificial Sequence; identical to SEQ ID NO: 4661
  Probe

SEQ ID NO: 53296 - DNA, 40 bp, Artificial Sequence; identical to SEQ ID NO: 4662
  Probe

SEQ ID NO: 53297 - DNA, 42 bp, Artificial Sequence; identical to SEQ ID NO: 46626
  Probe

SEQ ID NO: 53298 - DNA, 43 bp, Artificial Sequence; identical to SEQ ID NO: 4663
  Probe

SEQ ID NO: 53299 - DNA, 44 bp, Artificial Sequence; identical to SEQ ID NO: 4664
  Probe

SEQ ID NO: 53300 - DNA, 45 bp, Artificial Sequence; identical to SEQ ID NO: 4665
  Probe

SEQ ID NO: 53301 - DNA, 49 bp, Artificial Sequence
  Probe
cccattcttgcgacccgggttcgattcccgggcggcgcataggcgtttt

SEQ ID NO: 53302 - DNA, 50 bp, Artificial Sequence; identical to SEQ ID NO: 4666
  Probe

SEQ ID NO: 53303 - DNA, 29 bp, Artificial Sequence
  Probe
ccccaaaaattttggtgcaactccaaata

SEQ ID NO: 53304 - DNA, 38 bp, Artificial Sequence; identical to SEQ ID NO: 4673
  Probe

SEQ ID NO: 53305 - DNA, 19 bp, Artificial Sequence
  Probe
ccccaaacccactccacct

SEQ ID NO: 53306 - DNA, 22 bp, Artificial Sequence
  Probe
ccccatgtctaacaacatggct

SEQ ID NO: 53307 - DNA, 23 bp, Artificial Sequence
  Probe
cccccatgtctaacaacatggct

SEQ ID NO: 53308 - DNA, 24 bp, Artificial Sequence
  Probe
cccccatgtctaacaacatggctt

SEQ ID NO: 53309 - DNA, 25 bp, Artificial Sequence
  Probe
cccccatgtctaacaacatggcttt

SEQ ID NO: 53310 - DNA, 26 bp, Artificial Sequence
  Probe
cccccatgtctaacaacatggctttc

SEQ ID NO: 53311 - DNA, 27 bp, Artificial Sequence
  Probe
cccccatgtctaacaacatggctttct

SEQ ID NO: 53312 - DNA, 32 bp, Artificial Sequence; identical to SEQ ID NO: 4696
  Probe

SEQ ID NO: 53313 - DNA, 31 bp, Artificial Sequence; identical to SEQ ID NO: 602
  Probe

SEQ ID NO: 53314 - DNA, 37 bp, Artificial Sequence; identical to SEQ ID NO: 4703
  Probe

SEQ ID NO: 53315 - DNA, 28 bp, Artificial Sequence
  Probe
cccgaaaatgttggttatacccttcccg

SEQ ID NO: 53316 - DNA, 30 bp, Artificial Sequence; identical to SEQ ID NO: 611
  Probe

SEQ ID NO: 53317 - DNA, 36 bp, Artificial Sequence; identical to SEQ ID NO: 18528
  Probe

SEQ ID NO: 53318 - DNA, 16 bp, Artificial Sequence
  Probe
cccggcacctccacca

SEQ ID NO: 53319 - DNA, 30 bp, Artificial Sequence; identical to SEQ ID NO: 4748
  Probe

SEQ ID NO: 53320 - DNA, 31 bp, Artificial Sequence; identical to SEQ ID NO: 621
  Probe

SEQ ID NO: 53321 - DNA, 29 bp, Artificial Sequence
  Probe
cccggctagctcagtcggtagagcatggg

SEQ ID NO: 53322 - DNA, 31 bp, Artificial Sequence; identical to SEQ ID NO: 626
  Probe

SEQ ID NO: 53323 - DNA, 33 bp, Artificial Sequence; identical to SEQ ID NO: 628
  Probe

SEQ ID NO: 53324 - DNA, 41 bp, Artificial Sequence
  Probe
cccggctagctcagtcggtagagcatgggactcttaatccc

SEQ ID NO: 53325 - DNA, 28 bp, Artificial Sequence
  Probe
cccggtaatcgcataaaacttaaaactt

SEQ ID NO: 53326 - DNA, 50 bp, Artificial Sequence; identical to SEQ ID NO: 632
  Probe

SEQ ID NO: 53327 - DNA, 16 bp, Artificial Sequence
  Probe
cccggtcagggaacca

SEQ ID NO: 53328 - DNA, 30 bp, Artificial Sequence; identical to SEQ ID NO: 637
  Probe

SEQ ID NO: 53329 - DNA, 31 bp, Artificial Sequence; identical to SEQ ID NO: 638
  Probe

SEQ ID NO: 53330 - DNA, 34 bp, Artificial Sequence; identical to SEQ ID NO: 641
  Probe

SEQ ID NO: 53331 - DNA, 41 bp, Artificial Sequence
  Probe
ccctggtggtctagtggttaggattcggcgctctcaccgcc

SEQ ID NO: 53332 - DNA, 50 bp, Artificial Sequence; identical to SEQ ID NO: 4772
  Probe

SEQ ID NO: 53333 - DNA, 29 bp, Artificial Sequence
  Probe
ccgaaaatgttggttatacccttcccgta

SEQ ID NO: 53334 - DNA, 35 bp, Artificial Sequence; identical to SEQ ID NO: 18603
  Probe

SEQ ID NO: 53335 - DNA, 16 bp, Artificial Sequence
  Probe
ccgcagcaacctcggt

SEQ ID NO: 53336 - DNA, 17 bp, Artificial Sequence
  Probe
ccgcagcaacctcggtt

SEQ ID NO: 53337 - DNA, 19 bp, Artificial Sequence
  Probe
ccgctggtgtagtggtatc

SEQ ID NO: 53338 - DNA, 25 bp, Artificial Sequence
  Probe
ccgctggtgtagtggtatcatgcaa

SEQ ID NO: 53339 - DNA, 26 bp, Artificial Sequence
  Probe
ccgctggtgtagtggtatcatgcaag

SEQ ID NO: 53340 - DNA, 30 bp, Artificial Sequence; identical to SEQ ID NO: 657
  Probe

SEQ ID NO: 53341 - DNA, 31 bp, Artificial Sequence; identical to SEQ ID NO: 658
  Probe

SEQ ID NO: 53342 - DNA, 32 bp, Artificial Sequence; identical to SEQ ID NO: 659
  Probe

SEQ ID NO: 53343 - DNA, 35 bp, Artificial Sequence; identical to SEQ ID NO: 18676
  Probe

SEQ ID NO: 53344 - DNA, 37 bp, Artificial Sequence; identical to SEQ ID NO: 18677
  Probe

SEQ ID NO: 53345 - DNA, 38 bp, Artificial Sequence; identical to SEQ ID NO: 18678
  Probe

SEQ ID NO: 53346 - DNA, 45 bp, Artificial Sequence
  Probe
ccgctggtgtagtggtatcatgcaagattcccattcttgcgaccc

SEQ ID NO: 53347 - DNA, 50 bp, Artificial Sequence; identical to SEQ ID NO: 18682
  Probe

SEQ ID NO: 53348 - DNA, 29 bp, Artificial Sequence
  Probe
ccggagatgaaaacctttttccaaggaca

SEQ ID NO: 53349 - DNA, 31 bp, Artificial Sequence; identical to SEQ ID NO: 4817
  Probe

SEQ ID NO: 53350 - DNA, 32 bp, Artificial Sequence; identical to SEQ ID NO: 4818
  Probe

SEQ ID NO: 53351 - DNA, 33 bp, Artificial Sequence; identical to SEQ ID NO: 4819
  Probe

SEQ ID NO: 53352 - DNA, 24 bp, Artificial Sequence
  Probe
ccggatagctcagtcggtagagca

SEQ ID NO: 53353 - DNA, 26 bp, Artificial Sequence
  Probe
ccggatagctcagtcggtagagcatc

SEQ ID NO: 53354 - DNA, 32 bp, Artificial Sequence; identical to SEQ ID NO: 670
  Probe

SEQ ID NO: 53355 - DNA, 21 bp, Artificial Sequence
  Probe
ccggctagctcagtcggtaga

SEQ ID NO: 53356 - DNA, 23 bp, Artificial Sequence
  Probe
ccggctagctcagtcggtagagc

SEQ ID NO: 53357 - DNA, 25 bp, Artificial Sequence
  Probe
ccggctagctcagtcggtagagcat

SEQ ID NO: 53358 - DNA, 26 bp, Artificial Sequence
  Probe
ccggctagctcagtcggtagagcatg

SEQ ID NO: 53359 - DNA, 27 bp, Artificial Sequence
  Probe
ccggctagctcagtcggtagagcatga

SEQ ID NO: 53360 - DNA, 28 bp, Artificial Sequence
  Probe
ccggctagctcagtcggtagagcatgag

SEQ ID NO: 53361 - DNA, 31 bp, Artificial Sequence; identical to SEQ ID NO: 676
  Probe

SEQ ID NO: 53362 - DNA, 32 bp, Artificial Sequence; identical to SEQ ID NO: 677
  Probe

SEQ ID NO: 53363 - DNA, 27 bp, Artificial Sequence
  Probe
ccggctagctcagtcggtagagcatgg

SEQ ID NO: 53364 - DNA, 28 bp, Artificial Sequence
  Probe
ccggctagctcagtcggtagagcatggg

SEQ ID NO: 53365 - DNA, 40 bp, Artificial Sequence; identical to SEQ ID NO: 30125
  Probe

SEQ ID NO: 53366 - DNA, 50 bp, Artificial Sequence; identical to SEQ ID NO: 4828
  Probe

SEQ ID NO: 53367 - DNA, 18 bp, Artificial Sequence
  Probe
ccgggttcgattcccggg

SEQ ID NO: 53368 - DNA, 50 bp, Artificial Sequence; identical to SEQ ID NO: 685
  Probe

SEQ ID NO: 53369 - DNA, 28 bp, Artificial Sequence
  Probe
ccgtagtgtagcggttatcacattcgcc

SEQ ID NO: 53370 - DNA, 24 bp, Artificial Sequence
  Probe
ccgtagtgtagtggtcatcacgtt

SEQ ID NO: 53371 - DNA, 27 bp, Artificial Sequence
  Probe
ccgtagtgtagtggtcatcacgttcgc

SEQ ID NO: 53372 - DNA, 23 bp, Artificial Sequence
  Probe
ccgtagtgtagtggttatcacgt

SEQ ID NO: 53373 - DNA, 24 bp, Artificial Sequence
  Probe
ccgtagtgtagtggttatcacgtt

SEQ ID NO: 53374 - DNA, 26 bp, Artificial Sequence
  Probe
ccgtagtgtagtggttatcacgttcg

SEQ ID NO: 53375 - DNA, 27 bp, Artificial Sequence
  Probe
ccgtagtgtagtggttatcacgttcgc

SEQ ID NO: 53376 - DNA, 28 bp, Artificial Sequence
  Probe
ccgtagtgtagtggttatcacgttcgcc

SEQ ID NO: 53377 - DNA, 36 bp, Artificial Sequence; identical to SEQ ID NO: 18744
  Probe

SEQ ID NO: 53378 - DNA, 50 bp, Artificial Sequence; identical to SEQ ID NO: 4842
  Probe

SEQ ID NO: 53379 - DNA, 31 bp, Artificial Sequence; identical to SEQ ID NO: 4844
  Probe

SEQ ID NO: 53380 - DNA, 35 bp, Artificial Sequence
  Probe
ccgtagtgtagtggttatcacgttcgcctcacacg

SEQ ID NO: 53381 - DNA, 36 bp, Artificial Sequence; identical to SEQ ID NO: 18750
  Probe

SEQ ID NO: 53382 - DNA, 50 bp, Artificial Sequence; identical to SEQ ID NO: 4847
  Probe

SEQ ID NO: 53383 - DNA, 25 bp, Artificial Sequence
  Probe
ccgtgatcgtatagtggttagtact

SEQ ID NO: 53384 - DNA, 28 bp, Artificial Sequence
  Probe
ccgtggtgtagtggttatcacattcgcc

SEQ ID NO: 53385 - DNA, 49 bp, Artificial Sequence; identical to SEQ ID NO: 46905
  Probe

SEQ ID NO: 53386 - DNA, 50 bp, Artificial Sequence; identical to SEQ ID NO: 4855
  Probe

SEQ ID NO: 53387 - DNA, 24 bp, Artificial Sequence
  Probe
cctaacacgcgaaaggtccccggt

SEQ ID NO: 53388 - DNA, 21 bp, Artificial Sequence
  Probe
cctaagccagggattgtgggt

SEQ ID NO: 53389 - DNA, 24 bp, Artificial Sequence
  Probe
cctagccccaaacccactccacct

SEQ ID NO: 53390 - DNA, 18 bp, Artificial Sequence
  Probe
cctagcctttctattagc

SEQ ID NO: 53391 - DNA, 24 bp, Artificial Sequence
  Probe
cctcacacgcgaaaggtccccggt

SEQ ID NO: 53392 - DNA, 24 bp, Artificial Sequence
  Probe
cctcctaagccagggattgtgggt

SEQ ID NO: 53393 - DNA, 29 bp, Artificial Sequence
  Probe
cctcgttagtatagtggtgagtatccccg

SEQ ID NO: 53394 - DNA, 25 bp, Artificial Sequence
  Probe
cctgccacgcgggaggcccgggttc

SEQ ID NO: 53395 - DNA, 50 bp, Artificial Sequence; identical to SEQ ID NO: 39222
  Probe

SEQ ID NO: 53396 - DNA, 26 bp, Artificial Sequence
  Probe
cctgccacgcgggaggcccgggtttg

SEQ ID NO: 53397 - DNA, 16 bp, Artificial Sequence
  Probe
cctgtcacgcgggaga

SEQ ID NO: 53398 - DNA, 17 bp, Artificial Sequence
  Probe
cctgtcacgcgggagac

SEQ ID NO: 53399 - DNA, 18 bp, Artificial Sequence
  Probe
cctgtcacgcgggagacc

SEQ ID NO: 53400 - DNA, 21 bp, Artificial Sequence
  Probe
cctgtcacgcgggagaccggg

SEQ ID NO: 53401 - DNA, 25 bp, Artificial Sequence
  Probe
cctgtcacgcgggagaccggggttc

SEQ ID NO: 53402 - DNA, 26 bp, Artificial Sequence
  Probe
cctgtcacgcgggagaccggggttca

SEQ ID NO: 53403 - DNA, 27 bp, Artificial Sequence
  Probe
cctgtcacgcgggagaccggggttcaa

SEQ ID NO: 53404 - DNA, 26 bp, Artificial Sequence
  Probe
cctgtcacgcgggagaccggggttcg

SEQ ID NO: 53405 - DNA, 45 bp, Artificial Sequence; identical to SEQ ID NO: 4886
  Probe

SEQ ID NO: 53406 - DNA, 16 bp, Artificial Sequence
  Probe
ccttccaagcagttga

SEQ ID NO: 53407 - DNA, 17 bp, Artificial Sequence
  Probe
ccttccaagcagttgac

SEQ ID NO: 53408 - DNA, 18 bp, Artificial Sequence
  Probe
ccttccaagcagttgacc

SEQ ID NO: 53409 - DNA, 20 bp, Artificial Sequence
  Probe
ccttccaagcagttgacccg

SEQ ID NO: 53410 - DNA, 21 bp, Artificial Sequence
  Probe
ccttccaagcagttgacccgg

SEQ ID NO: 53411 - DNA, 22 bp, Artificial Sequence
  Probe
ccttccaagcagttgacccggg

SEQ ID NO: 53412 - DNA, 23 bp, Artificial Sequence
  Probe
ccttccaagcagttgacccgggt

SEQ ID NO: 53413 - DNA, 25 bp, Artificial Sequence
  Probe
ccttccaagcagttgacccgggttc

SEQ ID NO: 53414 - DNA, 26 bp, Artificial Sequence
  Probe
ccttccaagcagttgacccgggttcg

SEQ ID NO: 53415 - DNA, 27 bp, Artificial Sequence
  Probe
ccttccaagcagttgacccgggttcga

SEQ ID NO: 53416 - DNA, 28 bp, Artificial Sequence
  Probe
ccttccaagcagttgacccgggttcgat

SEQ ID NO: 53417 - DNA, 16 bp, Artificial Sequence
  Probe
ccttcgatagctcagc

SEQ ID NO: 53418 - DNA, 19 bp, Artificial Sequence
  Probe
ccttcgatagctcagttgg

SEQ ID NO: 53419 - DNA, 50 bp, Artificial Sequence; identical to SEQ ID NO: 4905
  Probe

SEQ ID NO: 53420 - DNA, 28 bp, Artificial Sequence
  Probe
cgaaaatgttggttatacccttcccgta

SEQ ID NO: 53421 - DNA, 30 bp, Artificial Sequence; identical to SEQ ID NO: 709
  Probe

SEQ ID NO: 53422 - DNA, 31 bp, Artificial Sequence; identical to SEQ ID NO: 710
  Probe

SEQ ID NO: 53423 - DNA, 33 bp, Artificial Sequence; identical to SEQ ID NO: 4916
  Probe

SEQ ID NO: 53424 - DNA, 34 bp, Artificial Sequence; identical to SEQ ID NO: 4917
  Probe

SEQ ID NO: 53425 - DNA, 21 bp, Artificial Sequence
  Probe
cgaaaccatcctctgctaggt

SEQ ID NO: 53426 - DNA, 21 bp, Artificial Sequence
  Probe
cgaaaccgggcggaaacacct

SEQ ID NO: 53427 - DNA, 28 bp, Artificial Sequence
  Probe
cgaagaagcagcttcaaacctgccgggg

SEQ ID NO: 53428 - DNA, 30 bp, Artificial Sequence; identical to SEQ ID NO: 4930
  Probe

SEQ ID NO: 53429 - DNA, 33 bp, Artificial Sequence; identical to SEQ ID NO: 4933
  Probe

SEQ ID NO: 53430 - DNA, 34 bp, Artificial Sequence; identical to SEQ ID NO: 4934
  Probe

SEQ ID NO: 53431 - DNA, 36 bp, Artificial Sequence; identical to SEQ ID NO: 4936
  Probe

SEQ ID NO: 53432 - DNA, 38 bp, Artificial Sequence; identical to SEQ ID NO: 18899
  Probe

SEQ ID NO: 53433 - DNA, 39 bp, Artificial Sequence
  Probe
cgaagaagcagcttcaaacctgccggggcttctcccgcc

SEQ ID NO: 53434 - DNA, 21 bp, Artificial Sequence
  Probe
cgaatcccaccgctgccacac

SEQ ID NO: 53435 - DNA, 21 bp, Artificial Sequence
  Probe
cgaatcccaccgctgccaggt

SEQ ID NO: 53436 - DNA, 21 bp, Artificial Sequence
  Probe
cgaatcccagcggtgcctccg

SEQ ID NO: 53437 - DNA, 50 bp, Artificial Sequence; identical to SEQ ID NO: 47051
  Probe

SEQ ID NO: 53438 - DNA, 37 bp, Artificial Sequence; identical to SEQ ID NO: 4944
  Probe

SEQ ID NO: 53439 - DNA, 21 bp, Artificial Sequence
  Probe
cgactcccggtatgggaacaa

SEQ ID NO: 53440 - DNA, 21 bp, Artificial Sequence
  Probe
cgactcccggtgtgggaacgc

SEQ ID NO: 53441 - DNA, 21 bp, Artificial Sequence
  Probe
cgatccccggcatctccattg

SEQ ID NO: 53442 - DNA, 21 bp, Artificial Sequence
  Probe
cgattccccgacggggaggca

SEQ ID NO: 53443 - DNA, 21 bp, Artificial Sequence
  Probe
cgattcccggccaacgcaagt

SEQ ID NO: 53444 - DNA, 21 bp, Artificial Sequence
  Probe
cgattcccggccaacgcagtg

SEQ ID NO: 53445 - DNA, 21 bp, Artificial Sequence
  Probe
cgattcccggccaatgcacga

SEQ ID NO: 53446 - DNA, 21 bp, Artificial Sequence
  Probe
cgattcccggccaatgcagca

SEQ ID NO: 53447 - DNA, 21 bp, Artificial Sequence
  Probe
cgattcccggcccatgcagca

SEQ ID NO: 53448 - DNA, 21 bp, Artificial Sequence
  Probe
cgattcccgggcggcgcactt

SEQ ID NO: 53449 - DNA, 21 bp, Artificial Sequence
  Probe
cgattctcatagtcctagaaa

SEQ ID NO: 53450 - DNA, 39 bp, Artificial Sequence; identical to SEQ ID NO: 4967
  Probe

SEQ ID NO: 53451 - DNA, 27 bp, Artificial Sequence
  Probe
cgcataaaacttaaaactttacagtca

SEQ ID NO: 53452 - DNA, 34 bp, Artificial Sequence; identical to SEQ ID NO: 4978
  Probe

SEQ ID NO: 53453 - DNA, 44 bp, Artificial Sequence; identical to SEQ ID NO: 717
  Probe

SEQ ID NO: 53454 - DNA, 45 bp, Artificial Sequence; identical to SEQ ID NO: 718
  Probe

SEQ ID NO: 53455 - DNA, 46 bp, Artificial Sequence; identical to SEQ ID NO: 4979
  Probe

SEQ ID NO: 53456 - DNA, 49 bp, Artificial Sequence; identical to SEQ ID NO: 4980
  Probe

SEQ ID NO: 53457 - DNA, 50 bp, Artificial Sequence; identical to SEQ ID NO: 4981
  Probe

SEQ ID NO: 53458 - DNA, 16 bp, Artificial Sequence
  Probe
cgccaaggtcgcgggt

SEQ ID NO: 53459 - DNA, 19 bp, Artificial Sequence
  Probe
cgcccggatagctcagtcg

SEQ ID NO: 53460 - DNA, 29 bp, Artificial Sequence
  Probe
cgccgctggtgtagtggtatcatgcaaga

SEQ ID NO: 53461 - DNA, 24 bp, Artificial Sequence
  Probe
cgccgtgatcgtatagtggttagt

SEQ ID NO: 53462 - DNA, 32 bp, Artificial Sequence; identical to SEQ ID NO: 4998
  Probe

SEQ ID NO: 53463 - DNA, 34 bp, Artificial Sequence; identical to SEQ ID NO: 5000
  Probe

SEQ ID NO: 53464 - DNA, 36 bp, Artificial Sequence; identical to SEQ ID NO: 5002
  Probe

SEQ ID NO: 53465 - DNA, 26 bp, Artificial Sequence
  Probe
cgcctcacacgcgaaaggtccccggt

SEQ ID NO: 53466 - DNA, 50 bp, Artificial Sequence; identical to SEQ ID NO: 5007
  Probe

SEQ ID NO: 53467 - DNA, 25 bp, Artificial Sequence
  Probe
cgccttttttcccggcggcgggaga

SEQ ID NO: 53468 - DNA, 26 bp, Artificial Sequence
  Probe
cgccttttttcccggcggcgggagaa

SEQ ID NO: 53469 - DNA, 28 bp, Artificial Sequence
  Probe
cgccttttttcccggcggcgggagaagt

SEQ ID NO: 53470 - DNA, 38 bp, Artificial Sequence; identical to SEQ ID NO: 5026
  Probe

SEQ ID NO: 53471 - DNA, 31 bp, Artificial Sequence; identical to SEQ ID NO: 731
  Probe

SEQ ID NO: 53472 - DNA, 38 bp, Artificial Sequence; identical to SEQ ID NO: 5037
  Probe

SEQ ID NO: 53473 - DNA, 38 bp, Artificial Sequence
  Probe
cgctctgagctaaacctagccccaaacccactccacct

SEQ ID NO: 53474 - DNA, 26 bp, Artificial Sequence
  Probe
cgctggtgtagtggtatcatgcaaga

SEQ ID NO: 53475 - DNA, 44 bp, Artificial Sequence
  Probe
cgctggtgtagtggtatcatgcaagattcccattcttgcgaccc

SEQ ID NO: 53476 - DNA, 25 bp, Artificial Sequence
  Probe
cggaagcgtgctgggcccataaccc

SEQ ID NO: 53477 - DNA, 26 bp, Artificial Sequence
  Probe
cggagatgaaaacctttttccaagga

SEQ ID NO: 53478 - DNA, 28 bp, Artificial Sequence
  Probe
cggagatgaaaacctttttccaaggaca

SEQ ID NO: 53479 - DNA, 29 bp, Artificial Sequence
  Probe
cggagatgaaaacctttttccaaggacaa

SEQ ID NO: 53480 - DNA, 30 bp, Artificial Sequence; identical to SEQ ID NO: 5060
  Probe

SEQ ID NO: 53481 - DNA, 31 bp, Artificial Sequence; identical to SEQ ID NO: 5061
  Probe

SEQ ID NO: 53482 - DNA, 32 bp, Artificial Sequence; identical to SEQ ID NO: 5062
  Probe

SEQ ID NO: 53483 - DNA, 23 bp, Artificial Sequence
  Probe
cggatagctcagtcggtagagca

SEQ ID NO: 53484 - DNA, 25 bp, Artificial Sequence
  Probe
cggatagctcagtcggtagagcatc

SEQ ID NO: 53485 - DNA, 29 bp, Artificial Sequence
  Probe
cggatagctcagtcggtagagcatcagac

SEQ ID NO: 53486 - DNA, 20 bp, Artificial Sequence
  Probe
cggatcagaagattccaggt

SEQ ID NO: 53487 - DNA, 20 bp, Artificial Sequence
  Probe
cggctagctcagtcggtaga

SEQ ID NO: 53488 - DNA, 21 bp, Artificial Sequence
  Probe
cggctagctcagtcggtagag

SEQ ID NO: 53489 - DNA, 23 bp, Artificial Sequence
  Probe
cggctagctcagtcggtagagca

SEQ ID NO: 53490 - DNA, 25 bp, Artificial Sequence
  Probe
cggctagctcagtcggtagagcatg

SEQ ID NO: 53491 - DNA, 27 bp, Artificial Sequence
  Probe
cggctagctcagtcggtagagcatgag

SEQ ID NO: 53492 - DNA, 30 bp, Artificial Sequence; identical to SEQ ID NO: 771
  Probe

SEQ ID NO: 53493 - DNA, 31 bp, Artificial Sequence; identical to SEQ ID NO: 772
  Probe

SEQ ID NO: 53494 - DNA, 26 bp, Artificial Sequence
  Probe
cggctagctcagtcggtagagcatgg

SEQ ID NO: 53495 - DNA, 39 bp, Artificial Sequence; identical to SEQ ID NO: 19247
  Probe

SEQ ID NO: 53496 - DNA, 46 bp, Artificial Sequence
  Probe
cggctagctcagtcggtagagcatgggactcttaatcccagggtcg

SEQ ID NO: 53497 - DNA, 36 bp, Artificial Sequence; identical to SEQ ID NO: 5084
  Probe

SEQ ID NO: 53498 - DNA, 16 bp, Artificial Sequence
  Probe
cgggaggcccgggttt

SEQ ID NO: 53499 - DNA, 17 bp, Artificial Sequence
  Probe
cgggaggcccgggtttg

SEQ ID NO: 53500 - DNA, 27 bp, Artificial Sequence
  Probe
cgggctcacatcaccccataaacaaat

SEQ ID NO: 53501 - DNA, 22 bp, Artificial Sequence
  Probe
cgggtgcgagaggtcccgggtt

SEQ ID NO: 53502 - DNA, 34 bp, Artificial Sequence; identical to SEQ ID NO: 790
  Probe

SEQ ID NO: 53503 - DNA, 50 bp, Artificial Sequence; identical to SEQ ID NO: 791
  Probe

SEQ ID NO: 53504 - DNA, 16 bp, Artificial Sequence
  Probe
cggtagagcatgggac

SEQ ID NO: 53505 - DNA, 26 bp, Artificial Sequence
  Probe
cggtagagcatgggactcttaatccc

SEQ ID NO: 53506 - DNA, 33 bp, Artificial Sequence; identical to SEQ ID NO: 5107
  Probe

SEQ ID NO: 53507 - DNA, 19 bp, Artificial Sequence
  Probe
cggtagcgcgtctgactcc

SEQ ID NO: 53508 - DNA, 16 bp, Artificial Sequence
  Probe
cggttaggattcctgg

SEQ ID NO: 53509 - DNA, 22 bp, Artificial Sequence
  Probe
cggttaggattcctggttttca

SEQ ID NO: 53510 - DNA, 24 bp, Artificial Sequence
  Probe
cggttaggattcctggttttcacc

SEQ ID NO: 53511 - DNA, 25 bp, Artificial Sequence
  Probe
cggttaggattcctggttttcaccc

SEQ ID NO: 53512 - DNA, 27 bp, Artificial Sequence
  Probe
cggttaggattcctggttttcacccag

SEQ ID NO: 53513 - DNA, 33 bp, Artificial Sequence
  Probe
cggttaggattcctggttttcacccaggcggcc

SEQ ID NO: 53514 - DNA, 35 bp, Artificial Sequence
  Probe
cggttaggattcctggttttcacccaggcggcccg

SEQ ID NO: 53515 - DNA, 35 bp, Artificial Sequence
  Probe
cggttaggattcctggttttcacccaggtggcccg

SEQ ID NO: 53516 - DNA, 21 bp, Artificial Sequence
  Probe
cgtaaacaggagatcctgggt

SEQ ID NO: 53517 - DNA, 22 bp, Artificial Sequence
  Probe
cgtaaacaggagatcctgggtt

SEQ ID NO: 53518 - DNA, 21 bp, Artificial Sequence
  Probe
cgtaaaccgaagatcacgggt

SEQ ID NO: 53519 - DNA, 23 bp, Artificial Sequence
  Probe
cgtagtgtagtggttatcacgtt

SEQ ID NO: 53520 - DNA, 26 bp, Artificial Sequence
  Probe
cgtagtgtagtggttatcacgttcgc

SEQ ID NO: 53521 - DNA, 27 bp, Artificial Sequence
  Probe
cgtagtgtagtggttatcacgttcgcc

SEQ ID NO: 53522 - DNA, 22 bp, Artificial Sequence
  Probe
cgtccgtgcctgagacccgagg

SEQ ID NO: 53523 - DNA, 28 bp, Artificial Sequence
  Probe
cgtggttgtagtccgtgcgagaataatg

SEQ ID NO: 53524 - DNA, 50 bp, Artificial Sequence; identical to SEQ ID NO: 5125
  Probe

SEQ ID NO: 53525 - DNA, 29 bp, Artificial Sequence
  Probe
ctaaacctagccccaaacccactccacct

SEQ ID NO: 53526 - DNA, 25 bp, Artificial Sequence
  Probe
ctaaagacaggggttaggcctcttt

SEQ ID NO: 53527 - DNA, 26 bp, Artificial Sequence
  Probe
ctaaagacaggggttaggcctctttt

SEQ ID NO: 53528 - DNA, 27 bp, Artificial Sequence
  Probe
ctaaagacaggggttaggcctcttttt

SEQ ID NO: 53529 - DNA, 31 bp, Artificial Sequence; identical to SEQ ID NO: 5142
  Probe

SEQ ID NO: 53530 - DNA, 32 bp, Artificial Sequence; identical to SEQ ID NO: 5143
  Probe

SEQ ID NO: 53531 - DNA, 33 bp, Artificial Sequence; identical to SEQ ID NO: 5144
  Probe

SEQ ID NO: 53532 - DNA, 34 bp, Artificial Sequence; identical to SEQ ID NO: 5145
  Probe

SEQ ID NO: 53533 - DNA, 33 bp, Artificial Sequence; identical to SEQ ID NO: 5152
  Probe

SEQ ID NO: 53534 - DNA, 22 bp, Artificial Sequence
  Probe
ctaaatcctatatatcttaatg

SEQ ID NO: 53535 - DNA, 23 bp, Artificial Sequence
  Probe
ctaacaacatggctttctcaact

SEQ ID NO: 53536 - DNA, 19 bp, Artificial Sequence
  Probe
ctaacacgcgaaaggtccc

SEQ ID NO: 53537 - DNA, 23 bp, Artificial Sequence
  Probe
ctaacacgcgaaaggtccccggt

SEQ ID NO: 53538 - DNA, 33 bp, Artificial Sequence; identical to SEQ ID NO: 5158
  Probe

SEQ ID NO: 53539 - DNA, 34 bp, Artificial Sequence; identical to SEQ ID NO: 5159
  Probe

SEQ ID NO: 53540 - DNA, 35 bp, Artificial Sequence; identical to SEQ ID NO: 5160
  Probe

SEQ ID NO: 53541 - DNA, 36 bp, Artificial Sequence; identical to SEQ ID NO: 5161
  Probe

SEQ ID NO: 53542 - DNA, 37 bp, Artificial Sequence; identical to SEQ ID NO: 5162
  Probe

SEQ ID NO: 53543 - DNA, 38 bp, Artificial Sequence; identical to SEQ ID NO: 5163
  Probe

SEQ ID NO: 53544 - DNA, 39 bp, Artificial Sequence; identical to SEQ ID NO: 5164
  Probe

SEQ ID NO: 53545 - DNA, 40 bp, Artificial Sequence; identical to SEQ ID NO: 5165
  Probe

SEQ ID NO: 53546 - DNA, 41 bp, Artificial Sequence; identical to SEQ ID NO: 5166
  Probe

SEQ ID NO: 53547 - DNA, 42 bp, Artificial Sequence; identical to SEQ ID NO: 5167
  Probe

SEQ ID NO: 53548 - DNA, 23 bp, Artificial Sequence
  Probe
ctaagccagggattgtgggttcg

SEQ ID NO: 53549 - DNA, 24 bp, Artificial Sequence
  Probe
ctaagccagggattgtgggttcga

SEQ ID NO: 53550 - DNA, 38 bp, Artificial Sequence; identical to SEQ ID NO: 5173
  Probe

SEQ ID NO: 53551 - DNA, 19 bp, Artificial Sequence
  Probe
ctaataacgccaaggtcgc

SEQ ID NO: 53552 - DNA, 23 bp, Artificial Sequence
  Probe
ctaataacgccaaggtcgcgggt

SEQ ID NO: 53553 - DNA, 24 bp, Artificial Sequence
  Probe
ctaataacgccaaggtcgcgggtt

SEQ ID NO: 53554 - DNA, 50 bp, Artificial Sequence; identical to SEQ ID NO: 806
  Probe

SEQ ID NO: 53555 - DNA, 18 bp, Artificial Sequence
  Probe
ctaatggataaggcactg

SEQ ID NO: 53556 - DNA, 34 bp, Artificial Sequence; identical to SEQ ID NO: 19454
  Probe

SEQ ID NO: 53557 - DNA, 23 bp, Artificial Sequence
  Probe
ctacggatcagaagattccaggt

SEQ ID NO: 53558 - DNA, 24 bp, Artificial Sequence
  Probe
ctacggatcagaagattccaggtt

SEQ ID NO: 53559 - DNA, 23 bp, Artificial Sequence
  Probe
ctacggatcagaagattctaggt

SEQ ID NO: 53560 - DNA, 24 bp, Artificial Sequence
  Probe
ctacggatcagaagattctaggtt

SEQ ID NO: 53561 - DNA, 23 bp, Artificial Sequence
  Probe
ctagccccaaacccactccacct

SEQ ID NO: 53562 - DNA, 25 bp, Artificial Sequence
  Probe
ctagctcagtcggtagagcatggga

SEQ ID NO: 53563 - DNA, 26 bp, Artificial Sequence
  Probe
ctagctcagtcggtagagcatgggac

SEQ ID NO: 53564 - DNA, 27 bp, Artificial Sequence
  Probe
ctagctcagtcggtagagcatgggact

SEQ ID NO: 53565 - DNA, 19 bp, Artificial Sequence
  Probe
ctaggggtatgattctcgc

SEQ ID NO: 53566 - DNA, 38 bp, Artificial Sequence; identical to SEQ ID NO: 19477
  Probe

SEQ ID NO: 53567 - DNA, 26 bp, Artificial Sequence
  Probe
ctagtggttaggattcggcgctctca

SEQ ID NO: 53568 - DNA, 42 bp, Artificial Sequence
  Probe
ctagtggttaggattcggcgctctcaccgccgcggcccgggt

SEQ ID NO: 53569 - DNA, 50 bp, Artificial Sequence; identical to SEQ ID NO: 5191
  Probe

SEQ ID NO: 53570 - DNA, 23 bp, Artificial Sequence
  Probe
ctcacaagaactgctaactcatg

SEQ ID NO: 53571 - DNA, 19 bp, Artificial Sequence
  Probe
ctcacacgcgaaaggtccc

SEQ ID NO: 53572 - DNA, 20 bp, Artificial Sequence
  Probe
ctcacacgcgaaaggtcccc

SEQ ID NO: 53573 - DNA, 23 bp, Artificial Sequence
  Probe
ctcacatcaccccataaacaaat

SEQ ID NO: 53574 - DNA, 16 bp, Artificial Sequence
  Probe
ctcaccgccgcggccc

SEQ ID NO: 53575 - DNA, 17 bp, Artificial Sequence
  Probe
ctcaccgccgcggcccg

SEQ ID NO: 53576 - DNA, 22 bp, Artificial Sequence
  Probe
ctcaccgccgcggcccgggttc

SEQ ID NO: 53577 - DNA, 19 bp, Artificial Sequence
  Probe
ctcacctggagcatgtttt

SEQ ID NO: 53578 - DNA, 20 bp, Artificial Sequence
  Probe
ctcacctggagcatgttttc

SEQ ID NO: 53579 - DNA, 21 bp, Artificial Sequence
  Probe
ctcacctggagcatgttttct

SEQ ID NO: 53580 - DNA, 22 bp, Artificial Sequence
  Probe
ctcacctggagcatgttttctt

SEQ ID NO: 53581 - DNA, 23 bp, Artificial Sequence
  Probe
ctcacctggagcatgttttcttc

SEQ ID NO: 53582 - DNA, 35 bp, Artificial Sequence; identical to SEQ ID NO: 5220
  Probe

SEQ ID NO: 53583 - DNA, 23 bp, Artificial Sequence
  Probe
ctcataatctgaaggtcctgagt

SEQ ID NO: 53584 - DNA, 17 bp, Artificial Sequence
  Probe
ctcatgcccccatgtct

SEQ ID NO: 53585 - DNA, 18 bp, Artificial Sequence
  Probe
ctcatgcccccatgtcta

SEQ ID NO: 53586 - DNA, 21 bp, Artificial Sequence
  Probe
ctcatgcccccatgtctaaca

SEQ ID NO: 53587 - DNA, 29 bp, Artificial Sequence
  Probe
ctcatgcccccatgtctaacaacatggct

SEQ ID NO: 53588 - DNA, 30 bp, Artificial Sequence; identical to SEQ ID NO: 5236
  Probe

SEQ ID NO: 53589 - DNA, 31 bp, Artificial Sequence; identical to SEQ ID NO: 5237
  Probe

SEQ ID NO: 53590 - DNA, 32 bp, Artificial Sequence; identical to SEQ ID NO: 5238
  Probe

SEQ ID NO: 53591 - DNA, 33 bp, Artificial Sequence; identical to SEQ ID NO: 5239
  Probe

SEQ ID NO: 53592 - DNA, 34 bp, Artificial Sequence; identical to SEQ ID NO: 5240
  Probe

SEQ ID NO: 53593 - DNA, 35 bp, Artificial Sequence; identical to SEQ ID NO: 5241
  Probe

SEQ ID NO: 53594 - DNA, 36 bp, Artificial Sequence; identical to SEQ ID NO: 5242
  Probe

SEQ ID NO: 53595 - DNA, 37 bp, Artificial Sequence; identical to SEQ ID NO: 5243
  Probe

SEQ ID NO: 53596 - DNA, 38 bp, Artificial Sequence; identical to SEQ ID NO: 5244
  Probe

SEQ ID NO: 53597 - DNA, 39 bp, Artificial Sequence; identical to SEQ ID NO: 19541
  Probe

SEQ ID NO: 53598 - DNA, 34 bp, Artificial Sequence; identical to SEQ ID NO: 5247
  Probe

SEQ ID NO: 53599 - DNA, 24 bp, Artificial Sequence
  Probe
ctccagatcagaaggttgcgtgtt

SEQ ID NO: 53600 - DNA, 16 bp, Artificial Sequence
  Probe
ctcccgccttttttcc

SEQ ID NO: 53601 - DNA, 17 bp, Artificial Sequence
  Probe
ctcccgccttttttccc

SEQ ID NO: 53602 - DNA, 18 bp, Artificial Sequence
  Probe
ctcccgccttttttcccg

SEQ ID NO: 53603 - DNA, 19 bp, Artificial Sequence
  Probe
ctcccgccttttttcccgg

SEQ ID NO: 53604 - DNA, 20 bp, Artificial Sequence
  Probe
ctcccgccttttttcccggc

SEQ ID NO: 53605 - DNA, 21 bp, Artificial Sequence
  Probe
ctcccgccttttttcccggcg

SEQ ID NO: 53606 - DNA, 22 bp, Artificial Sequence
  Probe
ctcccgccttttttcccggcgg

SEQ ID NO: 53607 - DNA, 23 bp, Artificial Sequence
  Probe
ctcccgccttttttcccggcggc

SEQ ID NO: 53608 - DNA, 24 bp, Artificial Sequence
  Probe
ctcccgccttttttcccggcggcg

SEQ ID NO: 53609 - DNA, 26 bp, Artificial Sequence
  Probe
ctcccgccttttttcccggcggcggg

SEQ ID NO: 53610 - DNA, 27 bp, Artificial Sequence
  Probe
ctcccgccttttttcccggcggcggga

SEQ ID NO: 53611 - DNA, 28 bp, Artificial Sequence
  Probe
ctcccgccttttttcccggcggcgggag

SEQ ID NO: 53612 - DNA, 29 bp, Artificial Sequence
  Probe
ctcccgccttttttcccggcggcgggaga

SEQ ID NO: 53613 - DNA, 30 bp, Artificial Sequence; identical to SEQ ID NO: 5265
  Probe

SEQ ID NO: 53614 - DNA, 18 bp, Artificial Sequence
  Probe
ctcccggtatgggaacaa

SEQ ID NO: 53615 - DNA, 17 bp, Artificial Sequence
  Probe
ctcccggtgtgggaacg

SEQ ID NO: 53616 - DNA, 18 bp, Artificial Sequence
  Probe
ctcccggtgtgggaacgc

SEQ ID NO: 53617 - DNA, 23 bp, Artificial Sequence
  Probe
ctcctaagccagggattgtgggt

SEQ ID NO: 53618 - DNA, 27 bp, Artificial Sequence
  Probe
ctcgcctgccacgcgggaggcccgggt

SEQ ID NO: 53619 - DNA, 18 bp, Artificial Sequence
  Probe
ctctcaccgccgcggccc

SEQ ID NO: 53620 - DNA, 20 bp, Artificial Sequence
  Probe
ctctgaatccagcgatccga

SEQ ID NO: 53621 - DNA, 23 bp, Artificial Sequence
  Probe
ctctgaatccagcgatccgagtt

SEQ ID NO: 53622 - DNA, 50 bp, Artificial Sequence; identical to SEQ ID NO: 5278
  Probe

SEQ ID NO: 53623 - DNA, 16 bp, Artificial Sequence
  Probe
ctgaaggtcgtgagtt

SEQ ID NO: 53624 - DNA, 17 bp, Artificial Sequence
  Probe
ctgaaggtcgtgagttc

SEQ ID NO: 53625 - DNA, 18 bp, Artificial Sequence
  Probe
ctgaatccagcgatccga

SEQ ID NO: 53626 - DNA, 19 bp, Artificial Sequence
  Probe
ctgaatccagcgatccgag

SEQ ID NO: 53627 - DNA, 22 bp, Artificial Sequence
  Probe
ctgaatccagcgatccgagttc

SEQ ID NO: 53628 - DNA, 23 bp, Artificial Sequence
  Probe
ctgaatccagcgatccgagttca

SEQ ID NO: 53629 - DNA, 39 bp, Artificial Sequence; identical to SEQ ID NO: 833
  Probe

SEQ ID NO: 53630 - DNA, 40 bp, Artificial Sequence
  Probe
ctgaatccagcgatccgagttcaaatctcggtggaacctg

SEQ ID NO: 53631 - DNA, 41 bp, Artificial Sequence; identical to SEQ ID NO: 5290
  Probe

SEQ ID NO: 53632 - DNA, 42 bp, Artificial Sequence; identical to SEQ ID NO: 5291
  Probe

SEQ ID NO: 53633 - DNA, 41 bp, Artificial Sequence; identical to SEQ ID NO: 5292
  Probe

SEQ ID NO: 53634 - DNA, 40 bp, Artificial Sequence
  Probe
ctgaatccagcgatccgagttcaaatctcggtggaacctt

SEQ ID NO: 53635 - DNA, 41 bp, Artificial Sequence; identical to SEQ ID NO: 5293
  Probe

SEQ ID NO: 53636 - DNA, 26 bp, Artificial Sequence
  Probe
ctgacaacagaggcttacgacccctt

SEQ ID NO: 53637 - DNA, 34 bp, Artificial Sequence; identical to SEQ ID NO: 5298
  Probe

SEQ ID NO: 53638 - DNA, 35 bp, Artificial Sequence; identical to SEQ ID NO: 5299
  Probe

SEQ ID NO: 53639 - DNA, 36 bp, Artificial Sequence; identical to SEQ ID NO: 5300
  Probe

SEQ ID NO: 53640 - DNA, 50 bp, Artificial Sequence; identical to SEQ ID NO: 5306
  Probe

SEQ ID NO: 53641 - DNA, 24 bp, Artificial Sequence
  Probe
ctgccacgcgggaggcccgggttc

SEQ ID NO: 53642 - DNA, 24 bp, Artificial Sequence
  Probe
ctgccacgcgggaggcccgggttt

SEQ ID NO: 53643 - DNA, 25 bp, Artificial Sequence
  Probe
ctgccacgcgggaggcccgggtttg

SEQ ID NO: 53644 - DNA, 26 bp, Artificial Sequence
  Probe
ctgccacgcgggaggcccgggtttga

SEQ ID NO: 53645 - DNA, 30 bp, Artificial Sequence; identical to SEQ ID NO: 5308
  Probe

SEQ ID NO: 53646 - DNA, 36 bp, Artificial Sequence; identical to SEQ ID NO: 5314
  Probe

SEQ ID NO: 53647 - DNA, 37 bp, Artificial Sequence; identical to SEQ ID NO: 5315
  Probe

SEQ ID NO: 53648 - DNA, 38 bp, Artificial Sequence; identical to SEQ ID NO: 5316
  Probe

SEQ ID NO: 53649 - DNA, 39 bp, Artificial Sequence; identical to SEQ ID NO: 5317
  Probe

SEQ ID NO: 53650 - DNA, 40 bp, Artificial Sequence; identical to SEQ ID NO: 5318
  Probe

SEQ ID NO: 53651 - DNA, 41 bp, Artificial Sequence; identical to SEQ ID NO: 5319
  Probe

SEQ ID NO: 53652 - DNA, 43 bp, Artificial Sequence; identical to SEQ ID NO: 5321
  Probe

SEQ ID NO: 53653 - DNA, 44 bp, Artificial Sequence; identical to SEQ ID NO: 5322
  Probe

SEQ ID NO: 53654 - DNA, 45 bp, Artificial Sequence; identical to SEQ ID NO: 5323
  Probe

SEQ ID NO: 53655 - DNA, 28 bp, Artificial Sequence
  Probe
ctgtagtgtagtggttatcacgttcgcc

SEQ ID NO: 53656 - DNA, 16 bp, Artificial Sequence
  Probe
ctgtcacgcgggagac

SEQ ID NO: 53657 - DNA, 21 bp, Artificial Sequence
  Probe
ctgtcacgcgggagaccgggg

SEQ ID NO: 53658 - DNA, 24 bp, Artificial Sequence
  Probe
ctgtcacgcgggagaccggggttc

SEQ ID NO: 53659 - DNA, 25 bp, Artificial Sequence
  Probe
ctgtcacgcgggagaccggggttca

SEQ ID NO: 53660 - DNA, 26 bp, Artificial Sequence
  Probe
ctgtcacgcgggagaccggggttcaa

SEQ ID NO: 53661 - DNA, 25 bp, Artificial Sequence
  Probe
ctgtcacgcgggagaccggggttcg

SEQ ID NO: 53662 - DNA, 44 bp, Artificial Sequence; identical to SEQ ID NO: 5340
  Probe

SEQ ID NO: 53663 - DNA, 27 bp, Artificial Sequence
  Probe
ctgtctagtaaacaggagatcctgggt

SEQ ID NO: 53664 - DNA, 27 bp, Artificial Sequence
  Probe
ctgtctcgtaaacaggagatcctgggt

SEQ ID NO: 53665 - DNA, 27 bp, Artificial Sequence
  Probe
ctgtcttgtaaacaggagatcctgggt

SEQ ID NO: 53666 - DNA, 22 bp, Artificial Sequence
  Probe
ctgtgctccggagttacctcgt

SEQ ID NO: 53667 - DNA, 23 bp, Artificial Sequence
  Probe
ctgtgctccggagttacctcgtt

SEQ ID NO: 53668 - DNA, 24 bp, Artificial Sequence
  Probe
ctgtgctccggagttacctcgttt

SEQ ID NO: 53669 - DNA, 25 bp, Artificial Sequence
  Probe
ctgtgctccggagttacctcgtttt

SEQ ID NO: 53670 - DNA, 19 bp, Artificial Sequence
  Probe
ctgttaaccgaaaggttgg

SEQ ID NO: 53671 - DNA, 45 bp, Artificial Sequence; identical to SEQ ID NO: 5346
  Probe

SEQ ID NO: 53672 - DNA, 40 bp, Artificial Sequence; identical to SEQ ID NO: 5351
  Probe

SEQ ID NO: 53673 - DNA, 41 bp, Artificial Sequence; identical to SEQ ID NO: 5352
  Probe

SEQ ID NO: 53674 - DNA, 42 bp, Artificial Sequence; identical to SEQ ID NO: 5353
  Probe

SEQ ID NO: 53675 - DNA, 45 bp, Artificial Sequence; identical to SEQ ID NO: 5355
  Probe

SEQ ID NO: 53676 - DNA, 22 bp, Artificial Sequence
  Probe
cttaacttgaccgctctgagct

SEQ ID NO: 53677 - DNA, 43 bp, Artificial Sequence; identical to SEQ ID NO: 5372
  Probe

SEQ ID NO: 53678 - DNA, 44 bp, Artificial Sequence; identical to SEQ ID NO: 5373
  Probe

SEQ ID NO: 53679 - DNA, 39 bp, Artificial Sequence; identical to SEQ ID NO: 5377
  Probe

SEQ ID NO: 53680 - DNA, 50 bp, Artificial Sequence; identical to SEQ ID NO: 850
  Probe

SEQ ID NO: 53681 - DNA, 50 bp, Artificial Sequence; identical to SEQ ID NO: 5380
  Probe

SEQ ID NO: 53682 - DNA, 50 bp, Artificial Sequence; identical to SEQ ID NO: 5381
  Probe

SEQ ID NO: 53683 - DNA, 28 bp, Artificial Sequence
  Probe
cttaggagatttcaacttaacttgaccg

SEQ ID NO: 53684 - DNA, 37 bp, Artificial Sequence; identical to SEQ ID NO: 5391
  Probe

SEQ ID NO: 53685 - DNA, 44 bp, Artificial Sequence; identical to SEQ ID NO: 47651
  Probe

SEQ ID NO: 53686 - DNA, 16 bp, Artificial Sequence
  Probe
cttccaagcagttgac

SEQ ID NO: 53687 - DNA, 22 bp, Artificial Sequence
  Probe
cttccaagcagttgacccgggt

SEQ ID NO: 53688 - DNA, 23 bp, Artificial Sequence
  Probe
cttccaagcagttgacccgggtt

SEQ ID NO: 53689 - DNA, 24 bp, Artificial Sequence
  Probe
cttccaagcagttgacccgggttc

SEQ ID NO: 53690 - DNA, 25 bp, Artificial Sequence
  Probe
cttccaagcagttgacccgggttcg

SEQ ID NO: 53691 - DNA, 27 bp, Artificial Sequence
  Probe
cttccaagcagttgacccgggttcgat

SEQ ID NO: 53692 - DNA, 41 bp, Artificial Sequence; identical to SEQ ID NO: 19749
  Probe

SEQ ID NO: 53693 - DNA, 43 bp, Artificial Sequence; identical to SEQ ID NO: 5395
  Probe

SEQ ID NO: 53694 - DNA, 40 bp, Artificial Sequence; identical to SEQ ID NO: 5396
  Probe

SEQ ID NO: 53695 - DNA, 18 bp, Artificial Sequence
  Probe
ctttacagtcagaggttc

SEQ ID NO: 53696 - DNA, 28 bp, Artificial Sequence
  Probe
ctttacagtcagaggttcaattcctctt

SEQ ID NO: 53697 - DNA, 29 bp, Artificial Sequence
  Probe
ctttacagtcagaggttcaattcctcttc

SEQ ID NO: 53698 - DNA, 30 bp, Artificial Sequence; identical to SEQ ID NO: 19761
  Probe

SEQ ID NO: 53699 - DNA, 31 bp, Artificial Sequence
  Probe
ctttacagtcagaggttcaattcctcttctt

SEQ ID NO: 53700 - DNA, 32 bp, Artificial Sequence; identical to SEQ ID NO: 39926
  Probe

SEQ ID NO: 53701 - DNA, 34 bp, Artificial Sequence
  Probe
ctttacagtcagaggttcaattcctcttcttaac

SEQ ID NO: 53702 - DNA, 35 bp, Artificial Sequence; identical to SEQ ID NO: 19762
  Probe

SEQ ID NO: 53703 - DNA, 37 bp, Artificial Sequence; identical to SEQ ID NO: 5399
  Probe

SEQ ID NO: 53704 - DNA, 38 bp, Artificial Sequence; identical to SEQ ID NO: 5400
  Probe

SEQ ID NO: 53705 - DNA, 22 bp, Artificial Sequence
  Probe
ctttgaatccagcgatccgagt

SEQ ID NO: 53706 - DNA, 46 bp, Artificial Sequence; identical to SEQ ID NO: 5403
  Probe

SEQ ID NO: 53707 - DNA, 50 bp, Artificial Sequence; identical to SEQ ID NO: 5404
  Probe

SEQ ID NO: 53708 - DNA, 43 bp, Artificial Sequence; identical to SEQ ID NO: 5406
  Probe

SEQ ID NO: 53709 - DNA, 48 bp, Artificial Sequence; identical to SEQ ID NO: 47680
  Probe

SEQ ID NO: 53710 - DNA, 49 bp, Artificial Sequence; identical to SEQ ID NO: 5407
  Probe

SEQ ID NO: 53711 - DNA, 50 bp, Artificial Sequence; identical to SEQ ID NO: 5408
  Probe

SEQ ID NO: 53712 - DNA, 17 bp, Artificial Sequence
  Probe
gaaaaagtcatggaggc

SEQ ID NO: 53713 - DNA, 18 bp, Artificial Sequence
  Probe
gaaaaagtcatggaggcc

SEQ ID NO: 53714 - DNA, 19 bp, Artificial Sequence
  Probe
gaaaaagtcatggaggcca

SEQ ID NO: 53715 - DNA, 21 bp, Artificial Sequence
  Probe
gaaaaagtcatggaggccatg

SEQ ID NO: 53716 - DNA, 24 bp, Artificial Sequence
  Probe
gaaaaagtcatggaggccatgggg

SEQ ID NO: 53717 - DNA, 25 bp, Artificial Sequence
  Probe
gaaaaagtcatggaggccatggggt

SEQ ID NO: 53718 - DNA, 26 bp, Artificial Sequence
  Probe
gaaaaagtcatggaggccatggggtt

SEQ ID NO: 53719 - DNA, 27 bp, Artificial Sequence
  Probe
gaaaaagtcatggaggccatggggttg

SEQ ID NO: 53720 - DNA, 28 bp, Artificial Sequence
  Probe
gaaaaagtcatggaggccatggggttgg

SEQ ID NO: 53721 - DNA, 29 bp, Artificial Sequence
  Probe
gaaaaagtcatggaggccatggggttggc

SEQ ID NO: 53722 - DNA, 30 bp, Artificial Sequence; identical to SEQ ID NO: 10057
  Probe

SEQ ID NO: 53723 - DNA, 31 bp, Artificial Sequence; identical to SEQ ID NO: 5416
  Probe

SEQ ID NO: 53724 - DNA, 32 bp, Artificial Sequence; identical to SEQ ID NO: 5417
  Probe

SEQ ID NO: 53725 - DNA, 50 bp, Artificial Sequence; identical to SEQ ID NO: 5419
  Probe

SEQ ID NO: 53726 - DNA, 24 bp, Artificial Sequence
  Probe
gaaaacctttttccaaggacaaat

SEQ ID NO: 53727 - DNA, 31 bp, Artificial Sequence; identical to SEQ ID NO: 862
  Probe

SEQ ID NO: 53728 - DNA, 33 bp, Artificial Sequence; identical to SEQ ID NO: 864
  Probe

SEQ ID NO: 53729 - DNA, 40 bp, Artificial Sequence; identical to SEQ ID NO: 5427
  Probe

SEQ ID NO: 53730 - DNA, 41 bp, Artificial Sequence; identical to SEQ ID NO: 5428
  Probe

SEQ ID NO: 53731 - DNA, 42 bp, Artificial Sequence; identical to SEQ ID NO: 5429
  Probe

SEQ ID NO: 53732 - DNA, 21 bp, Artificial Sequence
  Probe
gaaagcatgctccagtggcgc

SEQ ID NO: 53733 - DNA, 50 bp, Artificial Sequence; identical to SEQ ID NO: 5440
  Probe

SEQ ID NO: 53734 - DNA, 26 bp, Artificial Sequence
  Probe
gaaccaacacctctttacagtgaaat

SEQ ID NO: 53735 - DNA, 16 bp, Artificial Sequence
  Probe
gaactgctaactcatg

SEQ ID NO: 53736 - DNA, 39 bp, Artificial Sequence; identical to SEQ ID NO: 5463
  Probe

SEQ ID NO: 53737 - DNA, 40 bp, Artificial Sequence; identical to SEQ ID NO: 5464
  Probe

SEQ ID NO: 53738 - DNA, 41 bp, Artificial Sequence; identical to SEQ ID NO: 5465
  Probe

SEQ ID NO: 53739 - DNA, 42 bp, Artificial Sequence; identical to SEQ ID NO: 5466
  Probe

SEQ ID NO: 53740 - DNA, 43 bp, Artificial Sequence; identical to SEQ ID NO: 5467
  Probe

SEQ ID NO: 53741 - DNA, 44 bp, Artificial Sequence; identical to SEQ ID NO: 5468
  Probe

SEQ ID NO: 53742 - DNA, 45 bp, Artificial Sequence; identical to SEQ ID NO: 5469
  Probe

SEQ ID NO: 53743 - DNA, 46 bp, Artificial Sequence; identical to SEQ ID NO: 5470
  Probe

SEQ ID NO: 53744 - DNA, 50 bp, Artificial Sequence; identical to SEQ ID NO: 5472
  Probe

SEQ ID NO: 53745 - DNA, 27 bp, Artificial Sequence
  Probe
gaagaagcagcttcaaacctgccgggg

SEQ ID NO: 53746 - DNA, 29 bp, Artificial Sequence
  Probe
gaagaagcagcttcaaacctgccggggct

SEQ ID NO: 53747 - DNA, 31 bp, Artificial Sequence; identical to SEQ ID NO: 5479
  Probe

SEQ ID NO: 53748 - DNA, 33 bp, Artificial Sequence; identical to SEQ ID NO: 5481
  Probe

SEQ ID NO: 53749 - DNA, 30 bp, Artificial Sequence; identical to SEQ ID NO: 5497
  Probe

SEQ ID NO: 53750 - DNA, 19 bp, Artificial Sequence
  Probe
gaagcgggtgctcttattt

SEQ ID NO: 53751 - DNA, 20 bp, Artificial Sequence
  Probe
gaagcgggtgctcttatttt

SEQ ID NO: 53752 - DNA, 18 bp, Artificial Sequence
  Probe
gaatccagcgatccgagt

SEQ ID NO: 53753 - DNA, 19 bp, Artificial Sequence
  Probe
gaatccagcgatccgagtt

SEQ ID NO: 53754 - DNA, 39 bp, Artificial Sequence; identical to SEQ ID NO: 5522
  Probe

SEQ ID NO: 53755 - DNA, 40 bp, Artificial Sequence; identical to SEQ ID NO: 5523
  Probe

SEQ ID NO: 53756 - DNA, 39 bp, Artificial Sequence
  Probe
gaatccagcgatccgagttcaaatctcggtggaacctgt

SEQ ID NO: 53757 - DNA, 39 bp, Artificial Sequence
  Probe
gaatccagcgatccgagttcaaatctcggtggaaccttt

SEQ ID NO: 53758 - DNA, 39 bp, Artificial Sequence; identical to SEQ ID NO: 5525
  Probe

SEQ ID NO: 53759 - DNA, 40 bp, Artificial Sequence; identical to SEQ ID NO: 5526
  Probe

SEQ ID NO: 53760 - DNA, 29 bp, Artificial Sequence
  Probe
gaatctgacaacagaggcttacgacccct

SEQ ID NO: 53761 - DNA, 31 bp, Artificial Sequence; identical to SEQ ID NO: 899
  Probe

SEQ ID NO: 53762 - DNA, 33 bp, Artificial Sequence; identical to SEQ ID NO: 5535
  Probe

SEQ ID NO: 53763 - DNA, 37 bp, Artificial Sequence; identical to SEQ ID NO: 901
  Probe

SEQ ID NO: 53764 - DNA, 38 bp, Artificial Sequence; identical to SEQ ID NO: 5537
  Probe

SEQ ID NO: 53765 - DNA, 39 bp, Artificial Sequence; identical to SEQ ID NO: 5538
  Probe

SEQ ID NO: 53766 - DNA, 40 bp, Artificial Sequence; identical to SEQ ID NO: 5539
  Probe

SEQ ID NO: 53767 - DNA, 50 bp, Artificial Sequence; identical to SEQ ID NO: 5541
  Probe

SEQ ID NO: 53768 - DNA, 17 bp, Artificial Sequence
  Probe
gaattctcgcctgccac

SEQ ID NO: 53769 - DNA, 18 bp, Artificial Sequence
  Probe
gaattctcgcctgccacg

SEQ ID NO: 53770 - DNA, 32 bp, Artificial Sequence; identical to SEQ ID NO: 19994
  Probe

SEQ ID NO: 53771 - DNA, 45 bp, Artificial Sequence; identical to SEQ ID NO: 5544
  Probe

SEQ ID NO: 53772 - DNA, 46 bp, Artificial Sequence; identical to SEQ ID NO: 5545
  Probe

SEQ ID NO: 53773 - DNA, 25 bp, Artificial Sequence
  Probe
gacaacagaggcttacgacccctta

SEQ ID NO: 53774 - DNA, 31 bp, Artificial Sequence; identical to SEQ ID NO: 903
  Probe

SEQ ID NO: 53775 - DNA, 32 bp, Artificial Sequence; identical to SEQ ID NO: 5551
  Probe

SEQ ID NO: 53776 - DNA, 33 bp, Artificial Sequence; identical to SEQ ID NO: 5552
  Probe

SEQ ID NO: 53777 - DNA, 34 bp, Artificial Sequence; identical to SEQ ID NO: 5553
  Probe

SEQ ID NO: 53778 - DNA, 29 bp, Artificial Sequence
  Probe
gacaggggttaggcctctttttaccagct

SEQ ID NO: 53779 - DNA, 21 bp, Artificial Sequence
  Probe
gacccagtggcctaatggata

SEQ ID NO: 53780 - DNA, 27 bp, Artificial Sequence
  Probe
gacccagtggcctaatggataaggcat

SEQ ID NO: 53781 - DNA, 28 bp, Artificial Sequence
  Probe
gacccagtggcctaatggataaggcatc

SEQ ID NO: 53782 - DNA, 29 bp, Artificial Sequence
  Probe
gacccagtggcctaatggataaggcatca

SEQ ID NO: 53783 - DNA, 31 bp, Artificial Sequence; identical to SEQ ID NO: 904
  Probe

SEQ ID NO: 53784 - DNA, 32 bp, Artificial Sequence; identical to SEQ ID NO: 905
  Probe

SEQ ID NO: 53785 - DNA, 33 bp, Artificial Sequence; identical to SEQ ID NO: 906
  Probe

SEQ ID NO: 53786 - DNA, 34 bp, Artificial Sequence; identical to SEQ ID NO: 907
  Probe

SEQ ID NO: 53787 - DNA, 36 bp, Artificial Sequence; identical to SEQ ID NO: 909
  Probe

SEQ ID NO: 53788 - DNA, 37 bp, Artificial Sequence; identical to SEQ ID NO: 47856
  Probe

SEQ ID NO: 53789 - DNA, 31 bp, Artificial Sequence; identical to SEQ ID NO: 5567
  Probe

SEQ ID NO: 53790 - DNA, 31 bp, Artificial Sequence; identical to SEQ ID NO: 5568
  Probe

SEQ ID NO: 53791 - DNA, 31 bp, Artificial Sequence; identical to SEQ ID NO: 5580
  Probe

SEQ ID NO: 53792 - DNA, 30 bp, Artificial Sequence; identical to SEQ ID NO: 47878
  Probe

SEQ ID NO: 53793 - DNA, 20 bp, Artificial Sequence
  Probe
gacctcgtggcgcaatggta

SEQ ID NO: 53794 - DNA, 21 bp, Artificial Sequence
  Probe
gacctcgtggcgcaatggtag

SEQ ID NO: 53795 - DNA, 22 bp, Artificial Sequence
  Probe
gacctcgtggcgcaatggtagc

SEQ ID NO: 53796 - DNA, 23 bp, Artificial Sequence
  Probe
gacctcgtggcgcaatggtagcg

SEQ ID NO: 53797 - DNA, 30 bp, Artificial Sequence; identical to SEQ ID NO: 42992
  Probe

SEQ ID NO: 53798 - DNA, 34 bp, Artificial Sequence; identical to SEQ ID NO: 20086
  Probe

SEQ ID NO: 53799 - DNA, 16 bp, Artificial Sequence
  Probe
gacgaggtggccgagt

SEQ ID NO: 53800 - DNA, 18 bp, Artificial Sequence
  Probe
gacgaggtggccgagtgg

SEQ ID NO: 53801 - DNA, 29 bp, Artificial Sequence
  Probe
gacgggctcacatcaccccataaacaaat

SEQ ID NO: 53802 - DNA, 25 bp, Artificial Sequence
  Probe
gactacaaaaaggattagactgaac

SEQ ID NO: 53803 - DNA, 26 bp, Artificial Sequence
  Probe
gactacaaaaaggattagactgaacc

SEQ ID NO: 53804 - DNA, 25 bp, Artificial Sequence
  Probe
gactacggatcagaagattccaggt

SEQ ID NO: 53805 - DNA, 26 bp, Artificial Sequence
  Probe
gactacggatcagaagattccaggtt

SEQ ID NO: 53806 - DNA, 25 bp, Artificial Sequence
  Probe
gactacggatcagaagattctaggt

SEQ ID NO: 53807 - DNA, 26 bp, Artificial Sequence
  Probe
gactacggatcagaagattctaggtt

SEQ ID NO: 53808 - DNA, 36 bp, Artificial Sequence; identical to SEQ ID NO: 5607
  Probe

SEQ ID NO: 53809 - DNA, 22 bp, Artificial Sequence
  Probe
gactctgaatccagcgatccga

SEQ ID NO: 53810 - DNA, 23 bp, Artificial Sequence
  Probe
gactctgaatccagcgatccgag

SEQ ID NO: 53811 - DNA, 44 bp, Artificial Sequence; identical to SEQ ID NO: 5610
  Probe

SEQ ID NO: 53812 - DNA, 16 bp, Artificial Sequence
  Probe
gagaaagctcacaaga

SEQ ID NO: 53813 - DNA, 17 bp, Artificial Sequence
  Probe
gagaaagctcacaagaa

SEQ ID NO: 53814 - DNA, 18 bp, Artificial Sequence
  Probe
gagaaagctcacaagaac

SEQ ID NO: 53815 - DNA, 21 bp, Artificial Sequence
  Probe
gagaaagctcacaagaactgc

SEQ ID NO: 53816 - DNA, 24 bp, Artificial Sequence
  Probe
gagaaagctcacaagaactgctaa

SEQ ID NO: 53817 - DNA, 27 bp, Artificial Sequence
  Probe
gagaaagctcacaagaactgctaactc

SEQ ID NO: 53818 - DNA, 28 bp, Artificial Sequence
  Probe
gagaaagctcacaagaactgctaactca

SEQ ID NO: 53819 - DNA, 29 bp, Artificial Sequence
  Probe
gagaaagctcacaagaactgctaactcat

SEQ ID NO: 53820 - DNA, 31 bp, Artificial Sequence; identical to SEQ ID NO: 933
  Probe

SEQ ID NO: 53821 - DNA, 33 bp, Artificial Sequence; identical to SEQ ID NO: 935
  Probe

SEQ ID NO: 53822 - DNA, 34 bp, Artificial Sequence; identical to SEQ ID NO: 936
  Probe

SEQ ID NO: 53823 - DNA, 35 bp, Artificial Sequence; identical to SEQ ID NO: 937
  Probe

SEQ ID NO: 53824 - DNA, 37 bp, Artificial Sequence; identical to SEQ ID NO: 939
  Probe

SEQ ID NO: 53825 - DNA, 39 bp, Artificial Sequence; identical to SEQ ID NO: 941
  Probe

SEQ ID NO: 53826 - DNA, 43 bp, Artificial Sequence; identical to SEQ ID NO: 945
  Probe

SEQ ID NO: 53827 - DNA, 44 bp, Artificial Sequence; identical to SEQ ID NO: 946
  Probe

SEQ ID NO: 53828 - DNA, 46 bp, Artificial Sequence; identical to SEQ ID NO: 948
  Probe

SEQ ID NO: 53829 - DNA, 28 bp, Artificial Sequence
  Probe
gagaaccaacacctctttacagtgaaat

SEQ ID NO: 53830 - DNA, 24 bp, Artificial Sequence
  Probe
gagaccggggttcgattccccgac

SEQ ID NO: 53831 - DNA, 33 bp, Artificial Sequence; identical to SEQ ID NO: 5626
  Probe

SEQ ID NO: 53832 - DNA, 29 bp, Artificial Sequence
  Probe
gagatgaaaacctttttccaaggacaaat

SEQ ID NO: 53833 - DNA, 32 bp, Artificial Sequence; identical to SEQ ID NO: 5643
  Probe

SEQ ID NO: 53834 - DNA, 30 bp, Artificial Sequence; identical to SEQ ID NO: 13398
  Probe

SEQ ID NO: 53835 - DNA, 31 bp, Artificial Sequence; identical to SEQ ID NO: 5648
  Probe

SEQ ID NO: 53836 - DNA, 28 bp, Artificial Sequence
  Probe
gagcatgggactcttaatcccagggtcg

SEQ ID NO: 53837 - DNA, 29 bp, Artificial Sequence
  Probe
gagcatgggactcttaatcccagggtcgt

SEQ ID NO: 53838 - DNA, 16 bp, Artificial Sequence
  Probe
gagcccggtaatcgca

SEQ ID NO: 53839 - DNA, 23 bp, Artificial Sequence
  Probe
gagcccggtaatcgcataaaact

SEQ ID NO: 53840 - DNA, 24 bp, Artificial Sequence
  Probe
gagcccggtaatcgcataaaactt

SEQ ID NO: 53841 - DNA, 26 bp, Artificial Sequence
  Probe
gagcccggtaatcgcataaaacttaa

SEQ ID NO: 53842 - DNA, 27 bp, Artificial Sequence
  Probe
gagcccggtaatcgcataaaacttaaa

SEQ ID NO: 53843 - DNA, 28 bp, Artificial Sequence
  Probe
gagcccggtaatcgcataaaacttaaaa

SEQ ID NO: 53844 - DNA, 29 bp, Artificial Sequence
  Probe
gagcccggtaatcgcataaaacttaaaac

SEQ ID NO: 53845 - DNA, 32 bp, Artificial Sequence; identical to SEQ ID NO: 5657
  Probe

SEQ ID NO: 53846 - DNA, 33 bp, Artificial Sequence; identical to SEQ ID NO: 5658
  Probe

SEQ ID NO: 53847 - DNA, 38 bp, Artificial Sequence; identical to SEQ ID NO: 962
  Probe

SEQ ID NO: 53848 - DNA, 41 bp, Artificial Sequence; identical to SEQ ID NO: 20258
  Probe

SEQ ID NO: 53849 - DNA, 42 bp, Artificial Sequence; identical to SEQ ID NO: 13408
  Probe

SEQ ID NO: 53850 - DNA, 43 bp, Artificial Sequence; identical to SEQ ID NO: 20259
  Probe

SEQ ID NO: 53851 - DNA, 44 bp, Artificial Sequence; identical to SEQ ID NO: 5660
  Probe

SEQ ID NO: 53852 - DNA, 46 bp, Artificial Sequence; identical to SEQ ID NO: 5661
  Probe

SEQ ID NO: 53853 - DNA, 49 bp, Artificial Sequence; identical to SEQ ID NO: 5662
  Probe

SEQ ID NO: 53854 - DNA, 30 bp, Artificial Sequence; identical to SEQ ID NO: 969
  Probe

SEQ ID NO: 53855 - DNA, 38 bp, Artificial Sequence; identical to SEQ ID NO: 5681
  Probe

SEQ ID NO: 53856 - DNA, 39 bp, Artificial Sequence; identical to SEQ ID NO: 5682
  Probe

SEQ ID NO: 53857 - DNA, 29 bp, Artificial Sequence
  Probe
gagtatccccgcctgtcacgcgggagacc

SEQ ID NO: 53858 - DNA, 30 bp, Artificial Sequence; identical to SEQ ID NO: 20339
  Probe

SEQ ID NO: 53859 - DNA, 31 bp, Artificial Sequence; identical to SEQ ID NO: 13422
  Probe

SEQ ID NO: 53860 - DNA, 25 bp, Artificial Sequence
  Probe
gagttaaagactttttctctgattt

SEQ ID NO: 53861 - DNA, 39 bp, Artificial Sequence; identical to SEQ ID NO: 31557
  Probe

SEQ ID NO: 53862 - DNA, 48 bp, Artificial Sequence
  Probe
gataaaagagttactttgatagagtaaataataggagcttaaaccccc

SEQ ID NO: 53863 - DNA, 49 bp, Artificial Sequence
  Probe
gataaaagagttactttgatagagtaaataataggagcttaaaccccct

SEQ ID NO: 53864 - DNA, 42 bp, Artificial Sequence; identical to SEQ ID NO: 5712
  Probe

SEQ ID NO: 53865 - DNA, 43 bp, Artificial Sequence; identical to SEQ ID NO: 5713
  Probe

SEQ ID NO: 53866 - DNA, 26 bp, Artificial Sequence
  Probe
gatagctcagtcggtagagcatcaga

SEQ ID NO: 53867 - DNA, 25 bp, Artificial Sequence
  Probe
gatatccaaccttcagctatagggt

SEQ ID NO: 53868 - DNA, 20 bp, Artificial Sequence
  Probe
gatccccggcatctccattg

SEQ ID NO: 53869 - DNA, 26 bp, Artificial Sequence
  Probe
gatgaaaacctttttccaaggacaaa

SEQ ID NO: 53870 - DNA, 27 bp, Artificial Sequence
  Probe
gatgaaaacctttttccaaggacaaat

SEQ ID NO: 53871 - DNA, 26 bp, Artificial Sequence
  Probe
gatgcagagtggggttttgcagtcct

SEQ ID NO: 53872 - DNA, 29 bp, Artificial Sequence
  Probe
gatgcagagtggggttttgcagtccttag

SEQ ID NO: 53873 - DNA, 30 bp, Artificial Sequence; identical to SEQ ID NO: 5730
  Probe

SEQ ID NO: 53874 - DNA, 31 bp, Artificial Sequence; identical to SEQ ID NO: 5731
  Probe

SEQ ID NO: 53875 - DNA, 31 bp, Artificial Sequence; identical to SEQ ID NO: 5736
  Probe

SEQ ID NO: 53876 - DNA, 32 bp, Artificial Sequence; identical to SEQ ID NO: 5737
  Probe

SEQ ID NO: 53877 - DNA, 34 bp, Artificial Sequence; identical to SEQ ID NO: 5739
  Probe

SEQ ID NO: 53878 - DNA, 19 bp, Artificial Sequence
  Probe
gattcccattcttgcgacc

SEQ ID NO: 53879 - DNA, 21 bp, Artificial Sequence
  Probe
gattcccattcttgcgacccg

SEQ ID NO: 53880 - DNA, 25 bp, Artificial Sequence
  Probe
gattcccattcttgcgacccgggtt

SEQ ID NO: 53881 - DNA, 26 bp, Artificial Sequence
  Probe
gattcggcgctctcaccgccgcggcc

SEQ ID NO: 53882 - DNA, 27 bp, Artificial Sequence
  Probe
gattcggcgctttcaccgccgcggccc

SEQ ID NO: 53883 - DNA, 32 bp, Artificial Sequence
  Probe
gattctaggttcgactcctggctggctcgcga

SEQ ID NO: 53884 - DNA, 28 bp, Artificial Sequence
  Probe
gattctcgcttagggtgcgagaggtccc

SEQ ID NO: 53885 - DNA, 28 bp, Artificial Sequence
  Probe
gattctcgcttcgggtgcgagaggtccc

SEQ ID NO: 53886 - DNA, 28 bp, Artificial Sequence
  Probe
gattctcgctttgggtgcgagaggtccc

SEQ ID NO: 53887 - DNA, 28 bp, Artificial Sequence
  Probe
gattctcggtttgggtccgagaggtccc

SEQ ID NO: 53888 - DNA, 35 bp, Artificial Sequence; identical to SEQ ID NO: 5752
  Probe

SEQ ID NO: 53889 - DNA, 46 bp, Artificial Sequence; identical to SEQ ID NO: 5757
  Probe

SEQ ID NO: 53890 - DNA, 22 bp, Artificial Sequence
  Probe
gattgtgggttcgagtcccatc

SEQ ID NO: 53891 - DNA, 29 bp, Artificial Sequence
  Probe
gatttcaacttaacttgaccgctctgagc

SEQ ID NO: 53892 - DNA, 30 bp, Artificial Sequence; identical to SEQ ID NO: 5769
  Probe

SEQ ID NO: 53893 - DNA, 31 bp, Artificial Sequence; identical to SEQ ID NO: 5771
  Probe

SEQ ID NO: 53894 - DNA, 40 bp, Artificial Sequence; identical to SEQ ID NO: 5782
  Probe

SEQ ID NO: 53895 - DNA, 41 bp, Artificial Sequence; identical to SEQ ID NO: 5783
  Probe

SEQ ID NO: 53896 - DNA, 20 bp, Artificial Sequence
  Probe
gcaatggataacgcgtctga

SEQ ID NO: 53897 - DNA, 22 bp, Artificial Sequence
  Probe
gcaatggataacgcgtctgact

SEQ ID NO: 53898 - DNA, 18 bp, Artificial Sequence
  Probe
gcaatggatagcgcattg

SEQ ID NO: 53899 - DNA, 19 bp, Artificial Sequence
  Probe
gcaatggatagcgcattgg

SEQ ID NO: 53900 - DNA, 20 bp, Artificial Sequence
  Probe
gcaatggatagcgcattgga

SEQ ID NO: 53901 - DNA, 22 bp, Artificial Sequence
  Probe
gcaatggatagcgcattggact

SEQ ID NO: 53902 - DNA, 25 bp, Artificial Sequence
  Probe
gcaatggatagcgcattggacttct

SEQ ID NO: 53903 - DNA, 34 bp, Artificial Sequence; identical to SEQ ID NO: 20500
  Probe

SEQ ID NO: 53904 - DNA, 23 bp, Artificial Sequence
  Probe
gcacccaacttacacttaggaga

SEQ ID NO: 53905 - DNA, 42 bp, Artificial Sequence; identical to SEQ ID NO: 5813
  Probe

SEQ ID NO: 53906 - DNA, 50 bp, Artificial Sequence; identical to SEQ ID NO: 5820
  Probe

SEQ ID NO: 53907 - DNA, 38 bp, Artificial Sequence; identical to SEQ ID NO: 5821
  Probe

SEQ ID NO: 53908 - DNA, 23 bp, Artificial Sequence
  Probe
gcactctggactctgaatccagc

SEQ ID NO: 53909 - DNA, 27 bp, Artificial Sequence
  Probe
gcactctggactctgaatccagcgatc

SEQ ID NO: 53910 - DNA, 30 bp, Artificial Sequence; identical to SEQ ID NO: 990
  Probe

SEQ ID NO: 53911 - DNA, 32 bp, Artificial Sequence; identical to SEQ ID NO: 20552
  Probe

SEQ ID NO: 53912 - DNA, 33 bp, Artificial Sequence; identical to SEQ ID NO: 25394
  Probe

SEQ ID NO: 53913 - DNA, 29 bp, Artificial Sequence
  Probe
gcactctggactttgaatccagcgatccg

SEQ ID NO: 53914 - DNA, 30 bp, Artificial Sequence; identical to SEQ ID NO: 20554
  Probe

SEQ ID NO: 53915 - DNA, 32 bp, Artificial Sequence; identical to SEQ ID NO: 20556
  Probe

SEQ ID NO: 53916 - DNA, 33 bp, Artificial Sequence; identical to SEQ ID NO: 20557
  Probe

SEQ ID NO: 53917 - DNA, 28 bp, Artificial Sequence
  Probe
gcagagtggggttttgcagtccttagct

SEQ ID NO: 53918 - DNA, 18 bp, Artificial Sequence
  Probe
gcagcgatggccgagtgg

SEQ ID NO: 53919 - DNA, 44 bp, Artificial Sequence; identical to SEQ ID NO: 999
  Probe

SEQ ID NO: 53920 - DNA, 45 bp, Artificial Sequence; identical to SEQ ID NO: 5849
  Probe

SEQ ID NO: 53921 - DNA, 46 bp, Artificial Sequence; identical to SEQ ID NO: 5850
  Probe

SEQ ID NO: 53922 - DNA, 50 bp, Artificial Sequence; identical to SEQ ID NO: 5851
  Probe

SEQ ID NO: 53923 - DNA, 29 bp, Artificial Sequence
  Probe
gcatagctgccttccaagcagttgacccg

SEQ ID NO: 53924 - DNA, 38 bp, Artificial Sequence; identical to SEQ ID NO: 5861
  Probe

SEQ ID NO: 53925 - DNA, 18 bp, Artificial Sequence
  Probe
gcatgggtggttcagtgg

SEQ ID NO: 53926 - DNA, 20 bp, Artificial Sequence
  Probe
gcatgggtggttcagtggta

SEQ ID NO: 53927 - DNA, 21 bp, Artificial Sequence
  Probe
gcatgggtggttcagtggtag

SEQ ID NO: 53928 - DNA, 22 bp, Artificial Sequence
  Probe
gcatgggtggttcagtggtaga

SEQ ID NO: 53929 - DNA, 23 bp, Artificial Sequence
  Probe
gcatgggtggttcagtggtagaa

SEQ ID NO: 53930 - DNA, 24 bp, Artificial Sequence
  Probe
gcatgggtggttcagtggtagaat

SEQ ID NO: 53931 - DNA, 25 bp, Artificial Sequence
  Probe
gcatgggtggttcagtggtagaatt

SEQ ID NO: 53932 - DNA, 26 bp, Artificial Sequence
  Probe
gcatgggtggttcagtggtagaattc

SEQ ID NO: 53933 - DNA, 27 bp, Artificial Sequence
  Probe
gcatgggtggttcagtggtagaattct

SEQ ID NO: 53934 - DNA, 29 bp, Artificial Sequence
  Probe
gcatgggtggttcagtggtagaattctcg

SEQ ID NO: 53935 - DNA, 30 bp, Artificial Sequence; identical to SEQ ID NO: 1002
  Probe

SEQ ID NO: 53936 - DNA, 31 bp, Artificial Sequence; identical to SEQ ID NO: 1003
  Probe

SEQ ID NO: 53937 - DNA, 35 bp, Artificial Sequence; identical to SEQ ID NO: 1007
  Probe

SEQ ID NO: 53938 - DNA, 36 bp, Artificial Sequence; identical to SEQ ID NO: 1008
  Probe

SEQ ID NO: 53939 - DNA, 37 bp, Artificial Sequence; identical to SEQ ID NO: 5870
  Probe

SEQ ID NO: 53940 - DNA, 39 bp, Artificial Sequence; identical to SEQ ID NO: 5871
  Probe

SEQ ID NO: 53941 - DNA, 46 bp, Artificial Sequence; identical to SEQ ID NO: 20654
  Probe

SEQ ID NO: 53942 - DNA, 47 bp, Artificial Sequence; identical to SEQ ID NO: 5874
  Probe

SEQ ID NO: 53943 - DNA, 48 bp, Artificial Sequence; identical to SEQ ID NO: 5875
  Probe

SEQ ID NO: 53944 - DNA, 33 bp, Artificial Sequence; identical to SEQ ID NO: 5879
  Probe

SEQ ID NO: 53945 - DNA, 35 bp, Artificial Sequence; identical to SEQ ID NO: 13475
  Probe

SEQ ID NO: 53946 - DNA, 50 bp, Artificial Sequence; identical to SEQ ID NO: 1012
  Probe

SEQ ID NO: 53947 - DNA, 16 bp, Artificial Sequence
  Probe
gcattggtggttcagt

SEQ ID NO: 53948 - DNA, 18 bp, Artificial Sequence
  Probe
gcattggtggttcagtgg

SEQ ID NO: 53949 - DNA, 19 bp, Artificial Sequence
  Probe
gcattggtggttcagtggt

SEQ ID NO: 53950 - DNA, 20 bp, Artificial Sequence
  Probe
gcattggtggttcagtggta

SEQ ID NO: 53951 - DNA, 21 bp, Artificial Sequence
  Probe
gcattggtggttcagtggtag

SEQ ID NO: 53952 - DNA, 22 bp, Artificial Sequence
  Probe
gcattggtggttcagtggtaga

SEQ ID NO: 53953 - DNA, 23 bp, Artificial Sequence
  Probe
gcattggtggttcagtggtagaa

SEQ ID NO: 53954 - DNA, 24 bp, Artificial Sequence
  Probe
gcattggtggttcagtggtagaat

SEQ ID NO: 53955 - DNA, 25 bp, Artificial Sequence
  Probe
gcattggtggttcagtggtagaatt

SEQ ID NO: 53956 - DNA, 26 bp, Artificial Sequence
  Probe
gcattggtggttcagtggtagaattc

SEQ ID NO: 53957 - DNA, 27 bp, Artificial Sequence
  Probe
gcattggtggttcagtggtagaattct

SEQ ID NO: 53958 - DNA, 28 bp, Artificial Sequence
  Probe
gcattggtggttcagtggtagaattctc

SEQ ID NO: 53959 - DNA, 29 bp, Artificial Sequence
  Probe
gcattggtggttcagtggtagaattctcg

SEQ ID NO: 53960 - DNA, 30 bp, Artificial Sequence; identical to SEQ ID NO: 5900
  Probe

SEQ ID NO: 53961 - DNA, 31 bp, Artificial Sequence; identical to SEQ ID NO: 5901
  Probe

SEQ ID NO: 53962 - DNA, 32 bp, Artificial Sequence; identical to SEQ ID NO: 5902
  Probe

SEQ ID NO: 53963 - DNA, 33 bp, Artificial Sequence; identical to SEQ ID NO: 5903
  Probe

SEQ ID NO: 53964 - DNA, 34 bp, Artificial Sequence; identical to SEQ ID NO: 5904
  Probe

SEQ ID NO: 53965 - DNA, 35 bp, Artificial Sequence; identical to SEQ ID NO: 5905
  Probe

SEQ ID NO: 53966 - DNA, 36 bp, Artificial Sequence; identical to SEQ ID NO: 5906
  Probe

SEQ ID NO: 53967 - DNA, 37 bp, Artificial Sequence; identical to SEQ ID NO: 40250
  Probe

SEQ ID NO: 53968 - DNA, 33 bp, Artificial Sequence; identical to SEQ ID NO: 5908
  Probe

SEQ ID NO: 53969 - DNA, 34 bp, Artificial Sequence; identical to SEQ ID NO: 5909
  Probe

SEQ ID NO: 53970 - DNA, 35 bp, Artificial Sequence; identical to SEQ ID NO: 5910
  Probe

SEQ ID NO: 53971 - DNA, 36 bp, Artificial Sequence; identical to SEQ ID NO: 5911
  Probe

SEQ ID NO: 53972 - DNA, 37 bp, Artificial Sequence; identical to SEQ ID NO: 5912
  Probe

SEQ ID NO: 53973 - DNA, 42 bp, Artificial Sequence; identical to SEQ ID NO: 5913
  Probe

SEQ ID NO: 53974 - DNA, 44 bp, Artificial Sequence; identical to SEQ ID NO: 1018
  Probe

SEQ ID NO: 53975 - DNA, 45 bp, Artificial Sequence; identical to SEQ ID NO: 5915
  Probe

SEQ ID NO: 53976 - DNA, 46 bp, Artificial Sequence; identical to SEQ ID NO: 5916
  Probe

SEQ ID NO: 53977 - DNA, 47 bp, Artificial Sequence; identical to SEQ ID NO: 5917
  Probe

SEQ ID NO: 53978 - DNA, 48 bp, Artificial Sequence; identical to SEQ ID NO: 5918
  Probe

SEQ ID NO: 53979 - DNA, 37 bp, Artificial Sequence; identical to SEQ ID NO: 5919
  Probe

SEQ ID NO: 53980 - DNA, 38 bp, Artificial Sequence; identical to SEQ ID NO: 20705
  Probe

SEQ ID NO: 53981 - DNA, 22 bp, Artificial Sequence
  Probe
gccacgcgggaggcccgggttc

SEQ ID NO: 53982 - DNA, 38 bp, Artificial Sequence; identical to SEQ ID NO: 40267
  Probe

SEQ ID NO: 53983 - DNA, 39 bp, Artificial Sequence; identical to SEQ ID NO: 5925
  Probe

SEQ ID NO: 53984 - DNA, 44 bp, Artificial Sequence
  Probe
gccacgcgggaggcccgggttcgattcccggccaatgcaagttt

SEQ ID NO: 53985 - DNA, 45 bp, Artificial Sequence
  Probe
gccacgcgggaggcccgggttcgattcccggccaatgcaagtttt

SEQ ID NO: 53986 - DNA, 42 bp, Artificial Sequence; identical to SEQ ID NO: 5926
  Probe

SEQ ID NO: 53987 - DNA, 44 bp, Artificial Sequence; identical to SEQ ID NO: 48392
  Probe

SEQ ID NO: 53988 - DNA, 42 bp, Artificial Sequence; identical to SEQ ID NO: 20722
  Probe

SEQ ID NO: 53989 - DNA, 42 bp, Artificial Sequence; identical to SEQ ID NO: 5929
  Probe

SEQ ID NO: 53990 - DNA, 44 bp, Artificial Sequence
  Probe
gccacgcgggaggcccgggttcgattcccggcccatgcagcacg

SEQ ID NO: 53991 - DNA, 23 bp, Artificial Sequence
  Probe
gccacgcgggaggcccgggtttg

SEQ ID NO: 53992 - DNA, 16 bp, Artificial Sequence
  Probe
gccagggattgtgggt

SEQ ID NO: 53993 - DNA, 31 bp, Artificial Sequence; identical to SEQ ID NO: 5936
  Probe

SEQ ID NO: 53994 - DNA, 32 bp, Artificial Sequence; identical to SEQ ID NO: 5937
  Probe

SEQ ID NO: 53995 - DNA, 46 bp, Artificial Sequence; identical to SEQ ID NO: 5942
  Probe

SEQ ID NO: 53996 - DNA, 44 bp, Artificial Sequence; identical to SEQ ID NO: 5949
  Probe

SEQ ID NO: 53997 - DNA, 20 bp, Artificial Sequence
  Probe
gccccaaacccactccacct

SEQ ID NO: 53998 - DNA, 36 bp, Artificial Sequence; identical to SEQ ID NO: 1025
  Probe

SEQ ID NO: 53999 - DNA, 15 bp, Artificial Sequence
  Probe
gcccccatgtctaac

SEQ ID NO: 54000 - DNA, 16 bp, Artificial Sequence
  Probe
gcccccatgtctaaca

SEQ ID NO: 54001 - DNA, 17 bp, Artificial Sequence
  Probe
gcccccatgtctaacaa

SEQ ID NO: 54002 - DNA, 18 bp, Artificial Sequence
  Probe
gcccccatgtctaacaac

SEQ ID NO: 54003 - DNA, 19 bp, Artificial Sequence
  Probe
gcccccatgtctaacaaca

SEQ ID NO: 54004 - DNA, 20 bp, Artificial Sequence
  Probe
gcccccatgtctaacaacat

SEQ ID NO: 54005 - DNA, 21 bp, Artificial Sequence
  Probe
gcccccatgtctaacaacatg

SEQ ID NO: 54006 - DNA, 22 bp, Artificial Sequence
  Probe
gcccccatgtctaacaacatgg

SEQ ID NO: 54007 - DNA, 23 bp, Artificial Sequence
  Probe
gcccccatgtctaacaacatggc

SEQ ID NO: 54008 - DNA, 24 bp, Artificial Sequence
  Probe
gcccccatgtctaacaacatggct

SEQ ID NO: 54009 - DNA, 25 bp, Artificial Sequence
  Probe
gcccccatgtctaacaacatggctt

SEQ ID NO: 54010 - DNA, 26 bp, Artificial Sequence
  Probe
gcccccatgtctaacaacatggcttt

SEQ ID NO: 54011 - DNA, 27 bp, Artificial Sequence
  Probe
gcccccatgtctaacaacatggctttc

SEQ ID NO: 54012 - DNA, 28 bp, Artificial Sequence
  Probe
gcccccatgtctaacaacatggctttct

SEQ ID NO: 54013 - DNA, 29 bp, Artificial Sequence
  Probe
gcccccatgtctaacaacatggctttctc

SEQ ID NO: 54014 - DNA, 30 bp, Artificial Sequence; identical to SEQ ID NO: 5966
  Probe

SEQ ID NO: 54015 - DNA, 31 bp, Artificial Sequence; identical to SEQ ID NO: 5967
  Probe

SEQ ID NO: 54016 - DNA, 32 bp, Artificial Sequence; identical to SEQ ID NO: 5968
  Probe

SEQ ID NO: 54017 - DNA, 33 bp, Artificial Sequence; identical to SEQ ID NO: 5969
  Probe

SEQ ID NO: 54018 - DNA, 34 bp, Artificial Sequence; identical to SEQ ID NO: 5970
  Probe

SEQ ID NO: 54019 - DNA, 35 bp, Artificial Sequence; identical to SEQ ID NO: 5971
  Probe

SEQ ID NO: 54020 - DNA, 36 bp, Artificial Sequence; identical to SEQ ID NO: 5972
  Probe

SEQ ID NO: 54021 - DNA, 37 bp, Artificial Sequence; identical to SEQ ID NO: 5973
  Probe

SEQ ID NO: 54022 - DNA, 38 bp, Artificial Sequence; identical to SEQ ID NO: 5974
  Probe

SEQ ID NO: 54023 - DNA, 39 bp, Artificial Sequence; identical to SEQ ID NO: 5975
  Probe

SEQ ID NO: 54024 - DNA, 40 bp, Artificial Sequence; identical to SEQ ID NO: 5976
  Probe

SEQ ID NO: 54025 - DNA, 16 bp, Artificial Sequence
  Probe
gcccggatagctcagt

SEQ ID NO: 54026 - DNA, 17 bp, Artificial Sequence
  Probe
gcccggatagctcagtc

SEQ ID NO: 54027 - DNA, 20 bp, Artificial Sequence
  Probe
gcccggatagctcagtcggt

SEQ ID NO: 54028 - DNA, 24 bp, Artificial Sequence
  Probe
gcccggatagctcagtcggtagag

SEQ ID NO: 54029 - DNA, 28 bp, Artificial Sequence
  Probe
gcccggatagctcagtcggtagagcatc

SEQ ID NO: 54030 - DNA, 37 bp, Artificial Sequence; identical to SEQ ID NO: 1045
  Probe

SEQ ID NO: 54031 - DNA, 38 bp, Artificial Sequence; identical to SEQ ID NO: 5987
  Probe

SEQ ID NO: 54032 - DNA, 40 bp, Artificial Sequence; identical to SEQ ID NO: 13517
  Probe

SEQ ID NO: 54033 - DNA, 50 bp, Artificial Sequence; identical to SEQ ID NO: 1046
  Probe

SEQ ID NO: 54034 - DNA, 31 bp, Artificial Sequence; identical to SEQ ID NO: 20818
  Probe

SEQ ID NO: 54035 - DNA, 19 bp, Artificial Sequence
  Probe
gcccggctagctcagtcga

SEQ ID NO: 54036 - DNA, 31 bp, Artificial Sequence; identical to SEQ ID NO: 1050
  Probe

SEQ ID NO: 54037 - DNA, 32 bp, Artificial Sequence; identical to SEQ ID NO: 5994
  Probe

SEQ ID NO: 54038 - DNA, 19 bp, Artificial Sequence
  Probe
gcccggctagctcagtcgg

SEQ ID NO: 54039 - DNA, 33 bp, Artificial Sequence; identical to SEQ ID NO: 1065
  Probe

SEQ ID NO: 54040 - DNA, 35 bp, Artificial Sequence; identical to SEQ ID NO: 1072
  Probe

SEQ ID NO: 54041 - DNA, 37 bp, Artificial Sequence; identical to SEQ ID NO: 1074
  Probe

SEQ ID NO: 54042 - DNA, 38 bp, Artificial Sequence; identical to SEQ ID NO: 13544
  Probe

SEQ ID NO: 54043 - DNA, 39 bp, Artificial Sequence; identical to SEQ ID NO: 1075
  Probe

SEQ ID NO: 54044 - DNA, 45 bp, Artificial Sequence; identical to SEQ ID NO: 5998
  Probe

SEQ ID NO: 54045 - DNA, 49 bp, Artificial Sequence; identical to SEQ ID NO: 5999
  Probe

SEQ ID NO: 54046 - DNA, 37 bp, Artificial Sequence; identical to SEQ ID NO: 1087
  Probe

SEQ ID NO: 54047 - DNA, 38 bp, Artificial Sequence; identical to SEQ ID NO: 6000
  Probe

SEQ ID NO: 54048 - DNA, 39 bp, Artificial Sequence; identical to SEQ ID NO: 6001
  Probe

SEQ ID NO: 54049 - DNA, 40 bp, Artificial Sequence; identical to SEQ ID NO: 1088
  Probe

SEQ ID NO: 54050 - DNA, 41 bp, Artificial Sequence; identical to SEQ ID NO: 6002
  Probe

SEQ ID NO: 54051 - DNA, 43 bp, Artificial Sequence; identical to SEQ ID NO: 6003
  Probe

SEQ ID NO: 54052 - DNA, 44 bp, Artificial Sequence
  Probe
gcccggctagctcagtcggtagagcatgggactcttaatcccag

SEQ ID NO: 54053 - DNA, 46 bp, Artificial Sequence; identical to SEQ ID NO: 6004
  Probe

SEQ ID NO: 54054 - DNA, 47 bp, Artificial Sequence; identical to SEQ ID NO: 48497
  Probe

SEQ ID NO: 54055 - DNA, 48 bp, Artificial Sequence; identical to SEQ ID NO: 6005
  Probe

SEQ ID NO: 54056 - DNA, 23 bp, Artificial Sequence
  Probe
gcccggtaatcgcataaaactta

SEQ ID NO: 54057 - DNA, 29 bp, Artificial Sequence
  Probe
gcccggtaatcgcataaaacttaaaactt

SEQ ID NO: 54058 - DNA, 37 bp, Artificial Sequence; identical to SEQ ID NO: 1093
  Probe

SEQ ID NO: 54059 - DNA, 50 bp, Artificial Sequence; identical to SEQ ID NO: 6012
  Probe

SEQ ID NO: 54060 - DNA, 19 bp, Artificial Sequence
  Probe
gccgaaatagctcagttgg

SEQ ID NO: 54061 - DNA, 21 bp, Artificial Sequence
  Probe
gccgaaatagctcagttggga

SEQ ID NO: 54062 - DNA, 22 bp, Artificial Sequence
  Probe
gccgaaatagctcagttgggag

SEQ ID NO: 54063 - DNA, 23 bp, Artificial Sequence
  Probe
gccgaaatagctcagttgggaga

SEQ ID NO: 54064 - DNA, 24 bp, Artificial Sequence
  Probe
gccgaaatagctcagttgggagag

SEQ ID NO: 54065 - DNA, 25 bp, Artificial Sequence
  Probe
gccgaaatagctcagttgggagagc

SEQ ID NO: 54066 - DNA, 26 bp, Artificial Sequence
  Probe
gccgctggtgtagtggtatcatgcaa

SEQ ID NO: 54067 - DNA, 27 bp, Artificial Sequence
  Probe
gccgctggtgtagtggtatcatgcaag

SEQ ID NO: 54068 - DNA, 28 bp, Artificial Sequence
  Probe
gccgctggtgtagtggtatcatgcaaga

SEQ ID NO: 54069 - DNA, 33 bp, Artificial Sequence; identical to SEQ ID NO: 1103
  Probe

SEQ ID NO: 54070 - DNA, 16 bp, Artificial Sequence
  Probe
gccgtgatcgtatagt

SEQ ID NO: 54071 - DNA, 23 bp, Artificial Sequence
  Probe
gccgtgatcgtatagtggttagt

SEQ ID NO: 54072 - DNA, 25 bp, Artificial Sequence
  Probe
gccgtgatcgtatagtggttagtac

SEQ ID NO: 54073 - DNA, 26 bp, Artificial Sequence
  Probe
gccgtgatcgtatagtggttagtact

SEQ ID NO: 54074 - DNA, 31 bp, Artificial Sequence; identical to SEQ ID NO: 1106
  Probe

SEQ ID NO: 54075 - DNA, 35 bp, Artificial Sequence; identical to SEQ ID NO: 1110
  Probe

SEQ ID NO: 54076 - DNA, 50 bp, Artificial Sequence; identical to SEQ ID NO: 6040
  Probe

SEQ ID NO: 54077 - DNA, 25 bp, Artificial Sequence
  Probe
gcctcacacgcgaaaggtccccggt

SEQ ID NO: 54078 - DNA, 26 bp, Artificial Sequence
  Probe
gcctcctaagccagggattgtgggtt

SEQ ID NO: 54079 - DNA, 31 bp, Artificial Sequence; identical to SEQ ID NO: 48554
  Probe

SEQ ID NO: 54080 - DNA, 32 bp, Artificial Sequence
  Probe
gcctcgttagcgcagtaggcagcgcgtcagtc

SEQ ID NO: 54081 - DNA, 23 bp, Artificial Sequence
  Probe
gcctcgttagcgcagtaggtagc

SEQ ID NO: 54082 - DNA, 25 bp, Artificial Sequence
  Probe
gcctcgttagcgcagtaggtagcgc

SEQ ID NO: 54083 - DNA, 31 bp, Artificial Sequence; identical to SEQ ID NO: 6052
  Probe

SEQ ID NO: 54084 - DNA, 50 bp, Artificial Sequence
  Probe
gcctcgttagcgcagtaggtagcgcgtcagtctcataatctgaaggtcgt

SEQ ID NO: 54085 - DNA, 24 bp, Artificial Sequence
  Probe
gcctgccacgcgggaggcccgggt

SEQ ID NO: 54086 - DNA, 25 bp, Artificial Sequence
  Probe
gcctgccacgcgggaggcccgggtt

SEQ ID NO: 54087 - DNA, 32 bp, Artificial Sequence; identical to SEQ ID NO: 1116
  Probe

SEQ ID NO: 54088 - DNA, 33 bp, Artificial Sequence; identical to SEQ ID NO: 1117
  Probe

SEQ ID NO: 54089 - DNA, 31 bp, Artificial Sequence; identical to SEQ ID NO: 1120
  Probe

SEQ ID NO: 54090 - DNA, 33 bp, Artificial Sequence; identical to SEQ ID NO: 1122
  Probe

SEQ ID NO: 54091 - DNA, 17 bp, Artificial Sequence
  Probe
gcctgtcacgcgggaga

SEQ ID NO: 54092 - DNA, 25 bp, Artificial Sequence
  Probe
gcctgtcacgcgggagaccggggtt

SEQ ID NO: 54093 - DNA, 46 bp, Artificial Sequence; identical to SEQ ID NO: 6066
  Probe

SEQ ID NO: 54094 - DNA, 16 bp, Artificial Sequence
  Probe
gcgagaggtcccgggt

SEQ ID NO: 54095 - DNA, 17 bp, Artificial Sequence
  Probe
gcgagaggtcccgggtt

SEQ ID NO: 54096 - DNA, 16 bp, Artificial Sequence
  Probe
gcgccgctggtgtagt

SEQ ID NO: 54097 - DNA, 24 bp, Artificial Sequence
  Probe
gcgccgctggtgtagtggtatcat

SEQ ID NO: 54098 - DNA, 38 bp, Artificial Sequence; identical to SEQ ID NO: 6089
  Probe

SEQ ID NO: 54099 - DNA, 42 bp, Artificial Sequence; identical to SEQ ID NO: 6090
  Probe

SEQ ID NO: 54100 - DNA, 43 bp, Artificial Sequence; identical to SEQ ID NO: 6091
  Probe

SEQ ID NO: 54101 - DNA, 47 bp, Artificial Sequence; identical to SEQ ID NO: 6094
  Probe

SEQ ID NO: 54102 - DNA, 48 bp, Artificial Sequence; identical to SEQ ID NO: 6095
  Probe

SEQ ID NO: 54103 - DNA, 16 bp, Artificial Sequence
  Probe
gcgctctcaccgccgc

SEQ ID NO: 54104 - DNA, 22 bp, Artificial Sequence
  Probe
gcgctctcaccgccgcggcccg

SEQ ID NO: 54105 - DNA, 37 bp, Artificial Sequence; identical to SEQ ID NO: 6121
  Probe

SEQ ID NO: 54106 - DNA, 16 bp, Artificial Sequence
  Probe
gcgggaggcccgggtt

SEQ ID NO: 54107 - DNA, 17 bp, Artificial Sequence
  Probe
gcggttaggattcctgg

SEQ ID NO: 54108 - DNA, 25 bp, Artificial Sequence
  Probe
gcggttaggattcctggttttcacc

SEQ ID NO: 54109 - DNA, 35 bp, Artificial Sequence
  Probe
gcggttaggattcctggttttcacccaggcggccc

SEQ ID NO: 54110 - DNA, 29 bp, Artificial Sequence
  Probe
gcgtgctgggcccataacccagaggtcga

SEQ ID NO: 54111 - DNA, 24 bp, Artificial Sequence
  Probe
gcgttggtggtatagtggtaagca

SEQ ID NO: 54112 - DNA, 26 bp, Artificial Sequence
  Probe
gcgttggtggtatagtggtaagcata

SEQ ID NO: 54113 - DNA, 27 bp, Artificial Sequence
  Probe
gcgttggtggtatagtggtaagcatag

SEQ ID NO: 54114 - DNA, 29 bp, Artificial Sequence
  Probe
gcgttggtggtatagtggtaagcatagct

SEQ ID NO: 54115 - DNA, 30 bp, Artificial Sequence; identical to SEQ ID NO: 1183
  Probe

SEQ ID NO: 54116 - DNA, 31 bp, Artificial Sequence; identical to SEQ ID NO: 1184
  Probe

SEQ ID NO: 54117 - DNA, 32 bp, Artificial Sequence; identical to SEQ ID NO: 1185
  Probe

SEQ ID NO: 54118 - DNA, 34 bp, Artificial Sequence; identical to SEQ ID NO: 1187
  Probe

SEQ ID NO: 54119 - DNA, 36 bp, Artificial Sequence; identical to SEQ ID NO: 1189
  Probe

SEQ ID NO: 54120 - DNA, 39 bp, Artificial Sequence; identical to SEQ ID NO: 21123
  Probe

SEQ ID NO: 54121 - DNA, 40 bp, Artificial Sequence; identical to SEQ ID NO: 6137
  Probe

SEQ ID NO: 54122 - DNA, 43 bp, Artificial Sequence; identical to SEQ ID NO: 6138
  Probe

SEQ ID NO: 54123 - DNA, 47 bp, Artificial Sequence
  Probe
gcgttggtggtatagtggtaagcatagctgccttccaagcagttgac

SEQ ID NO: 54124 - DNA, 48 bp, Artificial Sequence; identical to SEQ ID NO: 6139
  Probe

SEQ ID NO: 54125 - DNA, 49 bp, Artificial Sequence; identical to SEQ ID NO: 6140
  Probe

SEQ ID NO: 54126 - DNA, 23 bp, Artificial Sequence
  Probe
gcgttggtggtatagtggtgagc

SEQ ID NO: 54127 - DNA, 24 bp, Artificial Sequence
  Probe
gcgttggtggtatagtggtgagca

SEQ ID NO: 54128 - DNA, 26 bp, Artificial Sequence
  Probe
gcgttggtggtatagtggtgagcata

SEQ ID NO: 54129 - DNA, 27 bp, Artificial Sequence
  Probe
gcgttggtggtatagtggtgagcatag

SEQ ID NO: 54130 - DNA, 28 bp, Artificial Sequence
  Probe
gcgttggtggtatagtggtgagcatagc

SEQ ID NO: 54131 - DNA, 29 bp, Artificial Sequence
  Probe
gcgttggtggtatagtggtgagcatagct

SEQ ID NO: 54132 - DNA, 30 bp, Artificial Sequence; identical to SEQ ID NO: 6150
  Probe

SEQ ID NO: 54133 - DNA, 31 bp, Artificial Sequence; identical to SEQ ID NO: 6151
  Probe

SEQ ID NO: 54134 - DNA, 32 bp, Artificial Sequence; identical to SEQ ID NO: 6152
  Probe

SEQ ID NO: 54135 - DNA, 33 bp, Artificial Sequence; identical to SEQ ID NO: 6153
  Probe

SEQ ID NO: 54136 - DNA, 34 bp, Artificial Sequence; identical to SEQ ID NO: 6154
  Probe

SEQ ID NO: 54137 - DNA, 35 bp, Artificial Sequence; identical to SEQ ID NO: 6155
  Probe

SEQ ID NO: 54138 - DNA, 36 bp, Artificial Sequence; identical to SEQ ID NO: 6156
  Probe

SEQ ID NO: 54139 - DNA, 37 bp, Artificial Sequence; identical to SEQ ID NO: 6157
  Probe

SEQ ID NO: 54140 - DNA, 39 bp, Artificial Sequence; identical to SEQ ID NO: 6158
  Probe

SEQ ID NO: 54141 - DNA, 40 bp, Artificial Sequence; identical to SEQ ID NO: 1193
  Probe

SEQ ID NO: 54142 - DNA, 41 bp, Artificial Sequence; identical to SEQ ID NO: 13692
  Probe

SEQ ID NO: 54143 - DNA, 43 bp, Artificial Sequence; identical to SEQ ID NO: 6159
  Probe

SEQ ID NO: 54144 - DNA, 48 bp, Artificial Sequence; identical to SEQ ID NO: 6163
  Probe

SEQ ID NO: 54145 - DNA, 49 bp, Artificial Sequence; identical to SEQ ID NO: 6164
  Probe

SEQ ID NO: 54146 - DNA, 24 bp, Artificial Sequence
  Probe
gcgttggtggtatagtggttagca

SEQ ID NO: 54147 - DNA, 26 bp, Artificial Sequence
  Probe
gcgttggtggtatagtggttagcata

SEQ ID NO: 54148 - DNA, 27 bp, Artificial Sequence
  Probe
gcgttggtggtatagtggttagcatag

SEQ ID NO: 54149 - DNA, 29 bp, Artificial Sequence
  Probe
gcgttggtggtatagtggttagcatagct

SEQ ID NO: 54150 - DNA, 30 bp, Artificial Sequence; identical to SEQ ID NO: 6172
  Probe

SEQ ID NO: 54151 - DNA, 31 bp, Artificial Sequence; identical to SEQ ID NO: 6173
  Probe

SEQ ID NO: 54152 - DNA, 32 bp, Artificial Sequence; identical to SEQ ID NO: 6174
  Probe

SEQ ID NO: 54153 - DNA, 33 bp, Artificial Sequence; identical to SEQ ID NO: 6175
  Probe

SEQ ID NO: 54154 - DNA, 34 bp, Artificial Sequence; identical to SEQ ID NO: 6176
  Probe

SEQ ID NO: 54155 - DNA, 35 bp, Artificial Sequence; identical to SEQ ID NO: 6177
  Probe

SEQ ID NO: 54156 - DNA, 36 bp, Artificial Sequence; identical to SEQ ID NO: 6178
  Probe

SEQ ID NO: 54157 - DNA, 39 bp, Artificial Sequence; identical to SEQ ID NO: 6180
  Probe

SEQ ID NO: 54158 - DNA, 40 bp, Artificial Sequence; identical to SEQ ID NO: 6181
  Probe

SEQ ID NO: 54159 - DNA, 43 bp, Artificial Sequence; identical to SEQ ID NO: 6182
  Probe

SEQ ID NO: 54160 - DNA, 48 bp, Artificial Sequence; identical to SEQ ID NO: 6184
  Probe

SEQ ID NO: 54161 - DNA, 49 bp, Artificial Sequence; identical to SEQ ID NO: 6185
  Probe

SEQ ID NO: 54162 - DNA, 16 bp, Artificial Sequence
  Probe
gctaaacctagcccca

SEQ ID NO: 54163 - DNA, 18 bp, Artificial Sequence
  Probe
gctaaacctagccccaaa

SEQ ID NO: 54164 - DNA, 19 bp, Artificial Sequence
  Probe
gctaaacctagccccaaac

SEQ ID NO: 54165 - DNA, 20 bp, Artificial Sequence
  Probe
gctaaacctagccccaaacc

SEQ ID NO: 54166 - DNA, 21 bp, Artificial Sequence
  Probe
gctaaacctagccccaaaccc

SEQ ID NO: 54167 - DNA, 22 bp, Artificial Sequence
  Probe
gctaaacctagccccaaaccca

SEQ ID NO: 54168 - DNA, 23 bp, Artificial Sequence
  Probe
gctaaacctagccccaaacccac

SEQ ID NO: 54169 - DNA, 24 bp, Artificial Sequence
  Probe
gctaaacctagccccaaacccact

SEQ ID NO: 54170 - DNA, 25 bp, Artificial Sequence
  Probe
gctaaacctagccccaaacccactc

SEQ ID NO: 54171 - DNA, 26 bp, Artificial Sequence
  Probe
gctaaacctagccccaaacccactcc

SEQ ID NO: 54172 - DNA, 27 bp, Artificial Sequence
  Probe
gctaaacctagccccaaacccactcca

SEQ ID NO: 54173 - DNA, 28 bp, Artificial Sequence
  Probe
gctaaacctagccccaaacccactccac

SEQ ID NO: 54174 - DNA, 29 bp, Artificial Sequence
  Probe
gctaaacctagccccaaacccactccacc

SEQ ID NO: 54175 - DNA, 30 bp, Artificial Sequence; identical to SEQ ID NO: 6203
  Probe

SEQ ID NO: 54176 - DNA, 25 bp, Artificial Sequence
  Probe
gctaaataagctatcgggcccatac

SEQ ID NO: 54177 - DNA, 23 bp, Artificial Sequence
  Probe
gctaaatcctatatatcttaatg

SEQ ID NO: 54178 - DNA, 34 bp, Artificial Sequence; identical to SEQ ID NO: 6217
  Probe

SEQ ID NO: 54179 - DNA, 35 bp, Artificial Sequence; identical to SEQ ID NO: 6218
  Probe

SEQ ID NO: 54180 - DNA, 36 bp, Artificial Sequence; identical to SEQ ID NO: 6219
  Probe

SEQ ID NO: 54181 - DNA, 38 bp, Artificial Sequence; identical to SEQ ID NO: 6221
  Probe

SEQ ID NO: 54182 - DNA, 39 bp, Artificial Sequence; identical to SEQ ID NO: 6222
  Probe

SEQ ID NO: 54183 - DNA, 40 bp, Artificial Sequence; identical to SEQ ID NO: 6223
  Probe

SEQ ID NO: 54184 - DNA, 42 bp, Artificial Sequence; identical to SEQ ID NO: 6225
  Probe

SEQ ID NO: 54185 - DNA, 43 bp, Artificial Sequence; identical to SEQ ID NO: 6226
  Probe

SEQ ID NO: 54186 - DNA, 23 bp, Artificial Sequence
  Probe
gctaaggaagtcctgtgctcagt

SEQ ID NO: 54187 - DNA, 24 bp, Artificial Sequence
  Probe
gctaaggaagtcctgtgctcagtt

SEQ ID NO: 54188 - DNA, 24 bp, Artificial Sequence
  Probe
gctaataacgccaaggtcgcgggt

SEQ ID NO: 54189 - DNA, 25 bp, Artificial Sequence
  Probe
gctaataacgccaaggtcgcgggtt

SEQ ID NO: 54190 - DNA, 16 bp, Artificial Sequence
  Probe
gctaatggtggagtta

SEQ ID NO: 54191 - DNA, 35 bp, Artificial Sequence; identical to SEQ ID NO: 6234
  Probe

SEQ ID NO: 54192 - DNA, 37 bp, Artificial Sequence; identical to SEQ ID NO: 6235
  Probe

SEQ ID NO: 54193 - DNA, 38 bp, Artificial Sequence; identical to SEQ ID NO: 6236
  Probe

SEQ ID NO: 54194 - DNA, 39 bp, Artificial Sequence; identical to SEQ ID NO: 6237
  Probe

SEQ ID NO: 54195 - DNA, 40 bp, Artificial Sequence; identical to SEQ ID NO: 6238
  Probe

SEQ ID NO: 54196 - DNA, 41 bp, Artificial Sequence; identical to SEQ ID NO: 6239
  Probe

SEQ ID NO: 54197 - DNA, 42 bp, Artificial Sequence; identical to SEQ ID NO: 6240
  Probe

SEQ ID NO: 54198 - DNA, 22 bp, Artificial Sequence
  Probe
gctacttttaaattctgacctc

SEQ ID NO: 54199 - DNA, 23 bp, Artificial Sequence
  Probe
gctacttttaaattctgacctca

SEQ ID NO: 54200 - DNA, 24 bp, Artificial Sequence
  Probe
gctacttttaaattctgacctcaa

SEQ ID NO: 54201 - DNA, 21 bp, Artificial Sequence
  Probe
gctagctcagtcggtagagca

SEQ ID NO: 54202 - DNA, 23 bp, Artificial Sequence
  Probe
gctagctcagtcggtagagcatg

SEQ ID NO: 54203 - DNA, 26 bp, Artificial Sequence
  Probe
gctagctcagtcggtagagcatgaga

SEQ ID NO: 54204 - DNA, 27 bp, Artificial Sequence
  Probe
gctagctcagtcggtagagcatgagac

SEQ ID NO: 54205 - DNA, 29 bp, Artificial Sequence
  Probe
gctagctcagtcggtagagcatgagactc

SEQ ID NO: 54206 - DNA, 44 bp, Artificial Sequence
  Probe
gctagctcagtcggtagagcatgagactcttaatctcagggtcg

SEQ ID NO: 54207 - DNA, 29 bp, Artificial Sequence
  Probe
gctagctcagtcggtagagcatgggactc

SEQ ID NO: 54208 - DNA, 44 bp, Artificial Sequence; identical to SEQ ID NO: 21247
  Probe

SEQ ID NO: 54209 - DNA, 50 bp, Artificial Sequence; identical to SEQ ID NO: 48788
  Probe

SEQ ID NO: 54210 - DNA, 21 bp, Artificial Sequence
  Probe
gctatcgggcccataccccga

SEQ ID NO: 54211 - DNA, 22 bp, Artificial Sequence
  Probe
gctatcgggcccataccccgaa

SEQ ID NO: 54212 - DNA, 23 bp, Artificial Sequence
  Probe
gctatcgggcccataccccgaaa

SEQ ID NO: 54213 - DNA, 24 bp, Artificial Sequence
  Probe
gctatcgggcccataccccgaaaa

SEQ ID NO: 54214 - DNA, 25 bp, Artificial Sequence
  Probe
gctatcgggcccataccccgaaaat

SEQ ID NO: 54215 - DNA, 26 bp, Artificial Sequence
  Probe
gctatcgggcccataccccgaaaatg

SEQ ID NO: 54216 - DNA, 27 bp, Artificial Sequence
  Probe
gctatcgggcccataccccgaaaatgt

SEQ ID NO: 54217 - DNA, 28 bp, Artificial Sequence
  Probe
gctatcgggcccataccccgaaaatgtt

SEQ ID NO: 54218 - DNA, 29 bp, Artificial Sequence
  Probe
gctatcgggcccataccccgaaaatgttg

SEQ ID NO: 54219 - DNA, 30 bp, Artificial Sequence; identical to SEQ ID NO: 6264
  Probe

SEQ ID NO: 54220 - DNA, 31 bp, Artificial Sequence; identical to SEQ ID NO: 6265
  Probe

SEQ ID NO: 54221 - DNA, 24 bp, Artificial Sequence
  Probe
gctcacaagaactgctaactcatg

SEQ ID NO: 54222 - DNA, 30 bp, Artificial Sequence
  Probe
gctcacaagaactgctaactcatgccccca

SEQ ID NO: 54223 - DNA, 50 bp, Artificial Sequence; identical to SEQ ID NO: 1205
  Probe

SEQ ID NO: 54224 - DNA, 24 bp, Artificial Sequence
  Probe
gctcacatcaccccataaacaaat

SEQ ID NO: 54225 - DNA, 30 bp, Artificial Sequence; identical to SEQ ID NO: 1206
  Probe

SEQ ID NO: 54226 - DNA, 50 bp, Artificial Sequence; identical to SEQ ID NO: 6286
  Probe

SEQ ID NO: 54227 - DNA, 23 bp, Artificial Sequence
  Probe
gctcgaagatatatgtatatatc

SEQ ID NO: 54228 - DNA, 30 bp, Artificial Sequence; identical to SEQ ID NO: 21297
  Probe

SEQ ID NO: 54229 - DNA, 16 bp, Artificial Sequence
  Probe
gctctcaccgccgcgg

SEQ ID NO: 54230 - DNA, 23 bp, Artificial Sequence
  Probe
gctctcaccgccgcggcccgggt

SEQ ID NO: 54231 - DNA, 24 bp, Artificial Sequence
  Probe
gctgataacaccaaggtcgcgggc

SEQ ID NO: 54232 - DNA, 25 bp, Artificial Sequence
  Probe
gctggtgtagtggtatcatgcaaga

SEQ ID NO: 54233 - DNA, 26 bp, Artificial Sequence
  Probe
gctgttaactaagtgtttgtgggttt

SEQ ID NO: 54234 - DNA, 39 bp, Artificial Sequence
  Probe
gctgttaactaagtgtttgtgggtttaagtcccattggt

SEQ ID NO: 54235 - DNA, 46 bp, Artificial Sequence; identical to SEQ ID NO: 6302
  Probe

SEQ ID NO: 54236 - DNA, 24 bp, Artificial Sequence
  Probe
gcttaaacccccttatttctagga

SEQ ID NO: 54237 - DNA, 44 bp, Artificial Sequence
  Probe
gcttagctgttaactaagtgtttgtgggtttaagtcccattggt

SEQ ID NO: 54238 - DNA, 24 bp, Artificial Sequence
  Probe
gcttcaaacctgccggggcttctc

SEQ ID NO: 54239 - DNA, 23 bp, Artificial Sequence
  Probe
gcttctgtagtgtagtggttatc

SEQ ID NO: 54240 - DNA, 28 bp, Artificial Sequence
  Probe
gcttctgtagtgtagtggttatcacgtt

SEQ ID NO: 54241 - DNA, 31 bp, Artificial Sequence; identical to SEQ ID NO: 1213
  Probe

SEQ ID NO: 54242 - DNA, 32 bp, Artificial Sequence; identical to SEQ ID NO: 1214
  Probe

SEQ ID NO: 54243 - DNA, 33 bp, Artificial Sequence; identical to SEQ ID NO: 1215
  Probe

SEQ ID NO: 54244 - DNA, 35 bp, Artificial Sequence; identical to SEQ ID NO: 1217
  Probe

SEQ ID NO: 54245 - DNA, 36 bp, Artificial Sequence; identical to SEQ ID NO: 1218
  Probe

SEQ ID NO: 54246 - DNA, 38 bp, Artificial Sequence
  Probe
gcttctgtagtgtagtggttatcacgttcgcctcacac

SEQ ID NO: 54247 - DNA, 42 bp, Artificial Sequence
  Probe
gcttctgtagtgtagtggttatcacgttcgcctcacacgcga

SEQ ID NO: 54248 - DNA, 44 bp, Artificial Sequence
  Probe
gcttctgtagtgtagtggttatcacgttcgcctcacacgcgaaa

SEQ ID NO: 54249 - DNA, 45 bp, Artificial Sequence
  Probe
gcttctgtagtgtagtggttatcacgttcgcctcacacgcgaaag

SEQ ID NO: 54250 - DNA, 49 bp, Artificial Sequence
  Probe
gcttctgtagtgtagtggttatcacgttcgcctcacacgcgaaaggtcc

SEQ ID NO: 54251 - DNA, 27 bp, Artificial Sequence
  Probe
gctttggggggttcgattccttccttt

SEQ ID NO: 54252 - DNA, 44 bp, Artificial Sequence
  Probe
gctttgggtgctaatggtggagttaaagactttttctctgattt

SEQ ID NO: 54253 - DNA, 45 bp, Artificial Sequence; identical to SEQ ID NO: 6343
  Probe

SEQ ID NO: 54254 - DNA, 34 bp, Artificial Sequence; identical to SEQ ID NO: 6355
  Probe

SEQ ID NO: 54255 - DNA, 26 bp, Artificial Sequence
  Probe
ggagatgaaaacctttttccaaggac

SEQ ID NO: 54256 - DNA, 27 bp, Artificial Sequence
  Probe
ggagatgaaaacctttttccaaggaca

SEQ ID NO: 54257 - DNA, 29 bp, Artificial Sequence
  Probe
ggagatgaaaacctttttccaaggacaaa

SEQ ID NO: 54258 - DNA, 30 bp, Artificial Sequence; identical to SEQ ID NO: 6362
  Probe

SEQ ID NO: 54259 - DNA, 31 bp, Artificial Sequence; identical to SEQ ID NO: 6363
  Probe

SEQ ID NO: 54260 - DNA, 26 bp, Artificial Sequence
  Probe
ggagatttcaacttaacttgaccgct

SEQ ID NO: 54261 - DNA, 32 bp, Artificial Sequence; identical to SEQ ID NO: 6374
  Probe

SEQ ID NO: 54262 - DNA, 33 bp, Artificial Sequence; identical to SEQ ID NO: 6375
  Probe

SEQ ID NO: 54263 - DNA, 26 bp, Artificial Sequence
  Probe
ggagttaaagactttttctctgattt

SEQ ID NO: 54264 - DNA, 25 bp, Artificial Sequence
  Probe
ggataaggcattggcctcctaagcc

SEQ ID NO: 54265 - DNA, 22 bp, Artificial Sequence
  Probe
ggatagctcagtcggtagagca

SEQ ID NO: 54266 - DNA, 28 bp, Artificial Sequence
  Probe
ggatgtagctcagtggtagagcgcatgc

SEQ ID NO: 54267 - DNA, 19 bp, Artificial Sequence
  Probe
ggattcctggttttcaccc

SEQ ID NO: 54268 - DNA, 23 bp, Artificial Sequence
  Probe
ggattcctggttttcacccaggc

SEQ ID NO: 54269 - DNA, 27 bp, Artificial Sequence
  Probe
ggattcctggttttcacccaggcggcc

SEQ ID NO: 54270 - DNA, 29 bp, Artificial Sequence
  Probe
ggattcctggttttcacccaggcggcccg

SEQ ID NO: 54271 - DNA, 29 bp, Artificial Sequence
  Probe
ggattcctggttttcacccaggtggcccg

SEQ ID NO: 54272 - DNA, 17 bp, Artificial Sequence
  Probe
ggattcggcgctctcac

SEQ ID NO: 54273 - DNA, 26 bp, Artificial Sequence
  Probe
ggattcggcgctctcaccgccgcggc

SEQ ID NO: 54274 - DNA, 28 bp, Artificial Sequence
  Probe
ggattcggcgctttcaccgccgcggccc

SEQ ID NO: 54275 - DNA, 23 bp, Artificial Sequence
  Probe
ggattgtgggttcgagtcccatc

SEQ ID NO: 54276 - DNA, 50 bp, Artificial Sequence; identical to SEQ ID NO: 6392
  Probe

SEQ ID NO: 54277 - DNA, 21 bp, Artificial Sequence
  Probe
ggcccataacccagaggtcga

SEQ ID NO: 54278 - DNA, 24 bp, Artificial Sequence
  Probe
ggcccataacccagaggtcgatgg

SEQ ID NO: 54279 - DNA, 50 bp, Artificial Sequence; identical to SEQ ID NO: 6398
  Probe

SEQ ID NO: 54280 - DNA, 46 bp, Artificial Sequence; identical to SEQ ID NO: 40752
  Probe

SEQ ID NO: 54281 - DNA, 30 bp, Artificial Sequence; identical to SEQ ID NO: 6411
  Probe

SEQ ID NO: 54282 - DNA, 31 bp, Artificial Sequence; identical to SEQ ID NO: 6412
  Probe

SEQ ID NO: 54283 - DNA, 32 bp, Artificial Sequence; identical to SEQ ID NO: 6413
  Probe

SEQ ID NO: 54284 - DNA, 33 bp, Artificial Sequence; identical to SEQ ID NO: 6414
  Probe

SEQ ID NO: 54285 - DNA, 34 bp, Artificial Sequence; identical to SEQ ID NO: 6415
  Probe

SEQ ID NO: 54286 - DNA, 39 bp, Artificial Sequence; identical to SEQ ID NO: 6419
  Probe

SEQ ID NO: 54287 - DNA, 45 bp, Artificial Sequence; identical to SEQ ID NO: 6422
  Probe

SEQ ID NO: 54288 - DNA, 23 bp, Artificial Sequence
  Probe
ggccccatggtgtaatggttagc

SEQ ID NO: 54289 - DNA, 50 bp, Artificial Sequence; identical to SEQ ID NO: 6427
  Probe

SEQ ID NO: 54290 - DNA, 17 bp, Artificial Sequence
  Probe
ggccgcgtggcctaatg

SEQ ID NO: 54291 - DNA, 18 bp, Artificial Sequence
  Probe
ggccgcgtggcctaatgg

SEQ ID NO: 54292 - DNA, 16 bp, Artificial Sequence
  Probe
ggccggttagctcagt

SEQ ID NO: 54293 - DNA, 18 bp, Artificial Sequence
  Probe
ggccggttagctcagttg

SEQ ID NO: 54294 - DNA, 19 bp, Artificial Sequence
  Probe
ggccggttagctcagttgg

SEQ ID NO: 54295 - DNA, 26 bp, Artificial Sequence
  Probe
ggcctcctaagccagggattgtgggt

SEQ ID NO: 54296 - DNA, 21 bp, Artificial Sequence
  Probe
ggcctcgtggcgcaacggtag

SEQ ID NO: 54297 - DNA, 22 bp, Artificial Sequence
  Probe
ggcctcgtggcgcaacggtagc

SEQ ID NO: 54298 - DNA, 20 bp, Artificial Sequence
  Probe
ggcgtgattcataccttttt

SEQ ID NO: 54299 - DNA, 21 bp, Artificial Sequence
  Probe
ggcgtgattcatacctttttc

SEQ ID NO: 54300 - DNA, 24 bp, Artificial Sequence
  Probe
ggctaaatcctatatatcttaatg

SEQ ID NO: 54301 - DNA, 22 bp, Artificial Sequence
  Probe
ggctagctcagtcggtagagca

SEQ ID NO: 54302 - DNA, 24 bp, Artificial Sequence
  Probe
ggctagctcagtcggtagagcatg

SEQ ID NO: 54303 - DNA, 30 bp, Artificial Sequence; identical to SEQ ID NO: 1285
  Probe

SEQ ID NO: 54304 - DNA, 26 bp, Artificial Sequence
  Probe
ggctagctcagtcggtagagcatggg

SEQ ID NO: 54305 - DNA, 45 bp, Artificial Sequence
  Probe
ggctagctcagtcggtagagcatgggactcttaatcccagggtcg

SEQ ID NO: 54306 - DNA, 50 bp, Artificial Sequence; identical to SEQ ID NO: 6462
  Probe

SEQ ID NO: 54307 - DNA, 25 bp, Artificial Sequence
  Probe
ggctcacatcaccccataaacaaat

SEQ ID NO: 54308 - DNA, 27 bp, Artificial Sequence
  Probe
ggctccgtggcgcaatggatagcgcat

SEQ ID NO: 54309 - DNA, 29 bp, Artificial Sequence
  Probe
ggctccgtggcgcaatggatagcgcattg

SEQ ID NO: 54310 - DNA, 31 bp, Artificial Sequence; identical to SEQ ID NO: 21644
  Probe

SEQ ID NO: 54311 - DNA, 32 bp, Artificial Sequence; identical to SEQ ID NO: 1304
  Probe

SEQ ID NO: 54312 - DNA, 33 bp, Artificial Sequence; identical to SEQ ID NO: 6492
  Probe

SEQ ID NO: 54313 - DNA, 23 bp, Artificial Sequence
  Probe
ggctcgaaggacttcgtctgtaa

SEQ ID NO: 54314 - DNA, 24 bp, Artificial Sequence
  Probe
ggctcgaaggacttcgtctgtaat

SEQ ID NO: 54315 - DNA, 25 bp, Artificial Sequence
  Probe
ggctcgaaggacttcgtctgtaatt

SEQ ID NO: 54316 - DNA, 26 bp, Artificial Sequence
  Probe
ggctcgttggtctaggggtatgattc

SEQ ID NO: 54317 - DNA, 27 bp, Artificial Sequence
  Probe
ggctcgttggtctaggggtatgattct

SEQ ID NO: 54318 - DNA, 29 bp, Artificial Sequence
  Probe
ggctcgttggtctaggggtatgattctcg

SEQ ID NO: 54319 - DNA, 30 bp, Artificial Sequence; identical to SEQ ID NO: 6496
  Probe

SEQ ID NO: 54320 - DNA, 31 bp, Artificial Sequence; identical to SEQ ID NO: 6497
  Probe

SEQ ID NO: 54321 - DNA, 30 bp, Artificial Sequence; identical to SEQ ID NO: 8665
  Probe

SEQ ID NO: 54322 - DNA, 31 bp, Artificial Sequence; identical to SEQ ID NO: 6502
  Probe

SEQ ID NO: 54323 - DNA, 50 bp, Artificial Sequence
  Probe
ggctctgtggcgcaatggatagcgcattggacttctagcctaaatcaaga

SEQ ID NO: 54324 - DNA, 26 bp, Artificial Sequence
  Probe
gggagaccggggttcgattccccgac

SEQ ID NO: 54325 - DNA, 31 bp, Artificial Sequence; identical to SEQ ID NO: 6530
  Probe

SEQ ID NO: 54326 - DNA, 29 bp, Artificial Sequence
  Probe
gggatgtagctcagtggtagagcgcatgc

SEQ ID NO: 54327 - DNA, 29 bp, Artificial Sequence
  Probe
gggattagctcaaatggtagagcgctcgc

SEQ ID NO: 54328 - DNA, 24 bp, Artificial Sequence
  Probe
gggattgtgggttcgagtcccatc

SEQ ID NO: 54329 - DNA, 25 bp, Artificial Sequence
  Probe
gggattgtgggttcgagtcccatct

SEQ ID NO: 54330 - DNA, 21 bp, Artificial Sequence
  Probe
gggccagtggcgcaatggata

SEQ ID NO: 54331 - DNA, 23 bp, Artificial Sequence
  Probe
gggccagtggcgcaatggataac

SEQ ID NO: 54332 - DNA, 25 bp, Artificial Sequence
  Probe
gggccagtggcgcaatggataacgc

SEQ ID NO: 54333 - DNA, 22 bp, Artificial Sequence
  Probe
gggcccataacccagaggtcga

SEQ ID NO: 54334 - DNA, 23 bp, Artificial Sequence
  Probe
gggcccataacccagaggtcgat

SEQ ID NO: 54335 - DNA, 25 bp, Artificial Sequence
  Probe
gggcccataacccagaggtcgatgg

SEQ ID NO: 54336 - DNA, 48 bp, Artificial Sequence
  Probe
gggcccataacccagaggtcgatggatcgaaaccatcctctgctaggg

SEQ ID NO: 54337 - DNA, 49 bp, Artificial Sequence
  Probe
gggcccataacccagaggtcgatggatcgaaaccatcctctgctaggga

SEQ ID NO: 54338 - DNA, 50 bp, Artificial Sequence; identical to SEQ ID NO: 49179
  Probe

SEQ ID NO: 54339 - DNA, 49 bp, Artificial Sequence; identical to SEQ ID NO: 49181
  Probe

SEQ ID NO: 54340 - DNA, 50 bp, Artificial Sequence; identical to SEQ ID NO: 6540
  Probe

SEQ ID NO: 54341 - DNA, 49 bp, Artificial Sequence; identical to SEQ ID NO: 49183
  Probe

SEQ ID NO: 54342 - DNA, 48 bp, Artificial Sequence
  Probe
gggcccataacccagaggtcgatggatcgaaaccatcctctgctattt

SEQ ID NO: 54343 - DNA, 49 bp, Artificial Sequence
  Probe
gggcccataacccagaggtcgatggatcgaaaccatcctctgctatttt

SEQ ID NO: 54344 - DNA, 50 bp, Artificial Sequence; identical to SEQ ID NO: 49184
  Probe

SEQ ID NO: 54345 - DNA, 46 bp, Artificial Sequence; identical to SEQ ID NO: 6558
  Probe

SEQ ID NO: 54346 - DNA, 26 bp, Artificial Sequence
  Probe
gggctcacatcaccccataaacaaat

SEQ ID NO: 54347 - DNA, 18 bp, Artificial Sequence
  Probe
ggggatgtagctcagtgg

SEQ ID NO: 54348 - DNA, 22 bp, Artificial Sequence
  Probe
ggggatgtagctcagtggtaga

SEQ ID NO: 54349 - DNA, 24 bp, Artificial Sequence
  Probe
ggggatgtagctcagtggtagagc

SEQ ID NO: 54350 - DNA, 31 bp, Artificial Sequence; identical to SEQ ID NO: 1336
  Probe

SEQ ID NO: 54351 - DNA, 16 bp, Artificial Sequence
  Probe
gggggattagctcaaa

SEQ ID NO: 54352 - DNA, 21 bp, Artificial Sequence
  Probe
gggggattagctcaaatggta

SEQ ID NO: 54353 - DNA, 22 bp, Artificial Sequence
  Probe
gggggattagctcaaatggtag

SEQ ID NO: 54354 - DNA, 23 bp, Artificial Sequence
  Probe
gggggattagctcaaatggtaga

SEQ ID NO: 54355 - DNA, 30 bp, Artificial Sequence; identical to SEQ ID NO: 6598
  Probe

SEQ ID NO: 54356 - DNA, 32 bp, Artificial Sequence; identical to SEQ ID NO: 6600
  Probe

SEQ ID NO: 54357 - DNA, 34 bp, Artificial Sequence; identical to SEQ ID NO: 6602
  Probe

SEQ ID NO: 54358 - DNA, 30 bp, Artificial Sequence; identical to SEQ ID NO: 21919
  Probe

SEQ ID NO: 54359 - DNA, 31 bp, Artificial Sequence; identical to SEQ ID NO: 1368
  Probe

SEQ ID NO: 54360 - DNA, 16 bp, Artificial Sequence
  Probe
ggggtatgattctcgc

SEQ ID NO: 54361 - DNA, 17 bp, Artificial Sequence
  Probe
ggggtatgattctcgct

SEQ ID NO: 54362 - DNA, 29 bp, Artificial Sequence
  Probe
ggggtgtagctcagtggtagagcgcgtgc

SEQ ID NO: 54363 - DNA, 16 bp, Artificial Sequence
  Probe
gggtatgattctcgct

SEQ ID NO: 54364 - DNA, 33 bp, Artificial Sequence; identical to SEQ ID NO: 6649
  Probe

SEQ ID NO: 54365 - DNA, 34 bp, Artificial Sequence; identical to SEQ ID NO: 21958
  Probe

SEQ ID NO: 54366 - DNA, 33 bp, Artificial Sequence; identical to SEQ ID NO: 6650
  Probe

SEQ ID NO: 54367 - DNA, 34 bp, Artificial Sequence; identical to SEQ ID NO: 13881
  Probe

SEQ ID NO: 54368 - DNA, 39 bp, Artificial Sequence
  Probe
gggtatgattctcgcttcgggtgcgagaggtcccgggtt

SEQ ID NO: 54369 - DNA, 33 bp, Artificial Sequence; identical to SEQ ID NO: 6651
  Probe

SEQ ID NO: 54370 - DNA, 34 bp, Artificial Sequence; identical to SEQ ID NO: 21964
  Probe

SEQ ID NO: 54371 - DNA, 39 bp, Artificial Sequence; identical to SEQ ID NO: 21968
  Probe

SEQ ID NO: 54372 - DNA, 34 bp, Artificial Sequence; identical to SEQ ID NO: 21969
  Probe

SEQ ID NO: 54373 - DNA, 39 bp, Artificial Sequence; identical to SEQ ID NO: 6655
  Probe

SEQ ID NO: 54374 - DNA, 28 bp, Artificial Sequence
  Probe
gggtgtagctcagtggtagagcgcgtgc

SEQ ID NO: 54375 - DNA, 26 bp, Artificial Sequence
  Probe
gggttcgattctcatagtcctagaaa

SEQ ID NO: 54376 - DNA, 25 bp, Artificial Sequence
  Probe
ggtaaaatggctgagtgaagcattg

SEQ ID NO: 54377 - DNA, 31 bp, Artificial Sequence; identical to SEQ ID NO: 6689
  Probe

SEQ ID NO: 54378 - DNA, 32 bp, Artificial Sequence; identical to SEQ ID NO: 6690
  Probe

SEQ ID NO: 54379 - DNA, 33 bp, Artificial Sequence; identical to SEQ ID NO: 6691
  Probe

SEQ ID NO: 54380 - DNA, 34 bp, Artificial Sequence; identical to SEQ ID NO: 6692
  Probe

SEQ ID NO: 54381 - DNA, 35 bp, Artificial Sequence; identical to SEQ ID NO: 6693
  Probe

SEQ ID NO: 54382 - DNA, 36 bp, Artificial Sequence; identical to SEQ ID NO: 6694
  Probe

SEQ ID NO: 54383 - DNA, 37 bp, Artificial Sequence; identical to SEQ ID NO: 6695
  Probe

SEQ ID NO: 54384 - DNA, 38 bp, Artificial Sequence; identical to SEQ ID NO: 6696
  Probe

SEQ ID NO: 54385 - DNA, 33 bp, Artificial Sequence; identical to SEQ ID NO: 13887
  Probe

SEQ ID NO: 54386 - DNA, 50 bp, Artificial Sequence; identical to SEQ ID NO: 6698
  Probe

SEQ ID NO: 54387 - DNA, 16 bp, Artificial Sequence
  Probe
ggtagaattctcgcct

SEQ ID NO: 54388 - DNA, 17 bp, Artificial Sequence
  Probe
ggtagaattctcgcctg

SEQ ID NO: 54389 - DNA, 18 bp, Artificial Sequence
  Probe
ggtagaattctcgcctgc

SEQ ID NO: 54390 - DNA, 19 bp, Artificial Sequence
  Probe
ggtagaattctcgcctgcc

SEQ ID NO: 54391 - DNA, 22 bp, Artificial Sequence
  Probe
ggtagaattctcgcctgccacg

SEQ ID NO: 54392 - DNA, 23 bp, Artificial Sequence
  Probe
ggtagaattctcgcctgccacgc

SEQ ID NO: 54393 - DNA, 33 bp, Artificial Sequence; identical to SEQ ID NO: 22065
  Probe

SEQ ID NO: 54394 - DNA, 37 bp, Artificial Sequence; identical to SEQ ID NO: 22066
  Probe

SEQ ID NO: 54395 - DNA, 17 bp, Artificial Sequence
  Probe
ggtagagcatgggactc

SEQ ID NO: 54396 - DNA, 32 bp, Artificial Sequence; identical to SEQ ID NO: 6706
  Probe

SEQ ID NO: 54397 - DNA, 37 bp, Artificial Sequence; identical to SEQ ID NO: 13895
  Probe

SEQ ID NO: 54398 - DNA, 18 bp, Artificial Sequence
  Probe
ggtagcgtggccgagcgg

SEQ ID NO: 54399 - DNA, 19 bp, Artificial Sequence
  Probe
ggtagcgtggccgagcggt

SEQ ID NO: 54400 - DNA, 23 bp, Artificial Sequence
  Probe
ggtagcgtggccgagcggtctaa

SEQ ID NO: 54401 - DNA, 18 bp, Artificial Sequence
  Probe
ggtagcgtggccgagtgg

SEQ ID NO: 54402 - DNA, 22 bp, Artificial Sequence
  Probe
ggtagcgtggccgagtggtcta

SEQ ID NO: 54403 - DNA, 29 bp, Artificial Sequence
  Probe
ggtatcatgcaagattcccattcttgcga

SEQ ID NO: 54404 - DNA, 31 bp, Artificial Sequence
  Probe
ggtatcatgcaagattcccattcttgcgacc

SEQ ID NO: 54405 - DNA, 37 bp, Artificial Sequence
  Probe
ggtatcatgcaagattcccattcttgcgacccgggtt

SEQ ID NO: 54406 - DNA, 38 bp, Artificial Sequence
  Probe
ggtatcatgcaagattcccattcttgcgacccgggttc

SEQ ID NO: 54407 - DNA, 32 bp, Artificial Sequence; identical to SEQ ID NO: 6725
  Probe

SEQ ID NO: 54408 - DNA, 33 bp, Artificial Sequence; identical to SEQ ID NO: 6726
  Probe

SEQ ID NO: 54409 - DNA, 37 bp, Artificial Sequence; identical to SEQ ID NO: 22109
  Probe

SEQ ID NO: 54410 - DNA, 38 bp, Artificial Sequence; identical to SEQ ID NO: 22110
  Probe

SEQ ID NO: 54411 - DNA, 40 bp, Artificial Sequence
  Probe
ggtatgattctcgcttagggtgcgagaggtcccgggttca

SEQ ID NO: 54412 - DNA, 32 bp, Artificial Sequence; identical to SEQ ID NO: 6727
  Probe

SEQ ID NO: 54413 - DNA, 33 bp, Artificial Sequence; identical to SEQ ID NO: 6728
  Probe

SEQ ID NO: 54414 - DNA, 34 bp, Artificial Sequence
  Probe
ggtatgattctcgcttcgggtgcgagaggtcccg

SEQ ID NO: 54415 - DNA, 37 bp, Artificial Sequence; identical to SEQ ID NO: 22112
  Probe

SEQ ID NO: 54416 - DNA, 38 bp, Artificial Sequence; identical to SEQ ID NO: 22113
  Probe

SEQ ID NO: 54417 - DNA, 40 bp, Artificial Sequence
  Probe
ggtatgattctcgcttcgggtgcgagaggtcccgggttca

SEQ ID NO: 54418 - DNA, 32 bp, Artificial Sequence; identical to SEQ ID NO: 6729
  Probe

SEQ ID NO: 54419 - DNA, 34 bp, Artificial Sequence; identical to SEQ ID NO: 22115
  Probe

SEQ ID NO: 54420 - DNA, 37 bp, Artificial Sequence; identical to SEQ ID NO: 22117
  Probe

SEQ ID NO: 54421 - DNA, 38 bp, Artificial Sequence; identical to SEQ ID NO: 22118
  Probe

SEQ ID NO: 54422 - DNA, 40 bp, Artificial Sequence
  Probe
ggtatgattctcgctttgggtgcgagaggtcccgggttca

SEQ ID NO: 54423 - DNA, 32 bp, Artificial Sequence; identical to SEQ ID NO: 6730
  Probe

SEQ ID NO: 54424 - DNA, 33 bp, Artificial Sequence; identical to SEQ ID NO: 1408
  Probe

SEQ ID NO: 54425 - DNA, 38 bp, Artificial Sequence
  Probe
ggtatgattctcggtttgggtccgagaggtcccgggtt

SEQ ID NO: 54426 - DNA, 27 bp, Artificial Sequence
  Probe
ggtcagctaaataagctatcgggccca

SEQ ID NO: 54427 - DNA, 28 bp, Artificial Sequence
  Probe
ggtcagctaaataagctatcgggcccat

SEQ ID NO: 54428 - DNA, 29 bp, Artificial Sequence
  Probe
ggtcagctaaataagctatcgggcccata

SEQ ID NO: 54429 - DNA, 30 bp, Artificial Sequence; identical to SEQ ID NO: 6735
  Probe

SEQ ID NO: 54430 - DNA, 31 bp, Artificial Sequence; identical to SEQ ID NO: 6736
  Probe

SEQ ID NO: 54431 - DNA, 39 bp, Artificial Sequence; identical to SEQ ID NO: 6740
  Probe

SEQ ID NO: 54432 - DNA, 41 bp, Artificial Sequence; identical to SEQ ID NO: 6742
  Probe

SEQ ID NO: 54433 - DNA, 42 bp, Artificial Sequence; identical to SEQ ID NO: 6743
  Probe

SEQ ID NO: 54434 - DNA, 43 bp, Artificial Sequence; identical to SEQ ID NO: 6744
  Probe

SEQ ID NO: 54435 - DNA, 44 bp, Artificial Sequence; identical to SEQ ID NO: 6745
  Probe

SEQ ID NO: 54436 - DNA, 45 bp, Artificial Sequence; identical to SEQ ID NO: 6746
  Probe

SEQ ID NO: 54437 - DNA, 22 bp, Artificial Sequence
  Probe
ggtcatgggtggttgcgttttg

SEQ ID NO: 54438 - DNA, 23 bp, Artificial Sequence
  Probe
ggtcatgggtggttgcgttttgg

SEQ ID NO: 54439 - DNA, 26 bp, Artificial Sequence
  Probe
ggtcccatggtgtaatggttagcact

SEQ ID NO: 54440 - DNA, 27 bp, Artificial Sequence
  Probe
ggtcccatggtgtaatggttagcactc

SEQ ID NO: 54441 - DNA, 29 bp, Artificial Sequence
  Probe
ggtcccatggtgtaatggttagcactctg

SEQ ID NO: 54442 - DNA, 30 bp, Artificial Sequence; identical to SEQ ID NO: 8706
  Probe

SEQ ID NO: 54443 - DNA, 31 bp, Artificial Sequence; identical to SEQ ID NO: 22145
  Probe

SEQ ID NO: 54444 - DNA, 49 bp, Artificial Sequence
  Probe
ggtcccatggtgtaatggttagcactctggactttgaatccagcgatcc

SEQ ID NO: 54445 - DNA, 31 bp, Artificial Sequence; identical to SEQ ID NO: 6765
  Probe

SEQ ID NO: 54446 - DNA, 24 bp, Artificial Sequence
  Probe
ggtctagtggttaggattcggcgc

SEQ ID NO: 54447 - DNA, 29 bp, Artificial Sequence
  Probe
ggtctagtggttaggattcggcgctctca

SEQ ID NO: 54448 - DNA, 41 bp, Artificial Sequence; identical to SEQ ID NO: 22188
  Probe

SEQ ID NO: 54449 - DNA, 26 bp, Artificial Sequence
  Probe
ggtctcgtaaaccgaagatcacgggt

SEQ ID NO: 54450 - DNA, 16 bp, Artificial Sequence
  Probe
ggtgagtatccccgcc

SEQ ID NO: 54451 - DNA, 19 bp, Artificial Sequence
  Probe
ggtgagtatccccgcctgt

SEQ ID NO: 54452 - DNA, 22 bp, Artificial Sequence
  Probe
ggtgagtatccccgcctgtcac

SEQ ID NO: 54453 - DNA, 32 bp, Artificial Sequence; identical to SEQ ID NO: 22198
  Probe

SEQ ID NO: 54454 - DNA, 33 bp, Artificial Sequence; identical to SEQ ID NO: 22199
  Probe

SEQ ID NO: 54455 - DNA, 37 bp, Artificial Sequence; identical to SEQ ID NO: 13936
  Probe

SEQ ID NO: 54456 - DNA, 27 bp, Artificial Sequence
  Probe
ggtgctaataacgccaaggtcgcgggt

SEQ ID NO: 54457 - DNA, 28 bp, Artificial Sequence
  Probe
ggtgctaataacgccaaggtcgcgggtt

SEQ ID NO: 54458 - DNA, 27 bp, Artificial Sequence
  Probe
ggtgctaataacgctaaggtcgcgggt

SEQ ID NO: 54459 - DNA, 27 bp, Artificial Sequence
  Probe
ggtgctgataacaccaaggtcgcgggc

SEQ ID NO: 54460 - DNA, 29 bp, Artificial Sequence
  Probe
ggtggagttaaagactttttctctgattt

SEQ ID NO: 54461 - DNA, 27 bp, Artificial Sequence
  Probe
ggtggttcagtggtagaattctcgcct

SEQ ID NO: 54462 - DNA, 30 bp, Artificial Sequence; identical to SEQ ID NO: 6787
  Probe

SEQ ID NO: 54463 - DNA, 22 bp, Artificial Sequence
  Probe
ggtgtagtggtatcatgcaaga

SEQ ID NO: 54464 - DNA, 40 bp, Artificial Sequence
  Probe
ggtgtagtggtatcatgcaagattcccattcttgcgaccc

SEQ ID NO: 54465 - DNA, 33 bp, Artificial Sequence; identical to SEQ ID NO: 22249
  Probe

SEQ ID NO: 54466 - DNA, 38 bp, Artificial Sequence; identical to SEQ ID NO: 22251
  Probe

SEQ ID NO: 54467 - DNA, 33 bp, Artificial Sequence; identical to SEQ ID NO: 22252
  Probe

SEQ ID NO: 54468 - DNA, 38 bp, Artificial Sequence; identical to SEQ ID NO: 22254
  Probe

SEQ ID NO: 54469 - DNA, 39 bp, Artificial Sequence; identical to SEQ ID NO: 22255
  Probe

SEQ ID NO: 54470 - DNA, 33 bp, Artificial Sequence; identical to SEQ ID NO: 13950
  Probe

SEQ ID NO: 54471 - DNA, 33 bp, Artificial Sequence
  Probe
ggttaggattcctggttttcacccaggtggccc

SEQ ID NO: 54472 - DNA, 16 bp, Artificial Sequence
  Probe
ggttaggattcggcgc

SEQ ID NO: 54473 - DNA, 17 bp, Artificial Sequence
  Probe
ggttaggattcggcgct

SEQ ID NO: 54474 - DNA, 23 bp, Artificial Sequence
  Probe
ggttaggattcggcgctctcacc

SEQ ID NO: 54475 - DNA, 26 bp, Artificial Sequence
  Probe
ggttaggattcggcgctctcaccgcc

SEQ ID NO: 54476 - DNA, 28 bp, Artificial Sequence
  Probe
ggttaggattcggcgctctcaccgccgc

SEQ ID NO: 54477 - DNA, 32 bp, Artificial Sequence; identical to SEQ ID NO: 32694
  Probe

SEQ ID NO: 54478 - DNA, 34 bp, Artificial Sequence
  Probe
ggttaggattcggcgctctcaccgccgcggcccg

SEQ ID NO: 54479 - DNA, 16 bp, Artificial Sequence
  Probe
ggttagtactctgcgt

SEQ ID NO: 54480 - DNA, 23 bp, Artificial Sequence
  Probe
ggttcagtggtagaattctcgcc

SEQ ID NO: 54481 - DNA, 24 bp, Artificial Sequence
  Probe
ggttcagtggtagaattctcgcct

SEQ ID NO: 54482 - DNA, 25 bp, Artificial Sequence
  Probe
ggttcagtggtagaattctcgcctg

SEQ ID NO: 54483 - DNA, 26 bp, Artificial Sequence
  Probe
ggttcagtggtagaattctcgcctgc

SEQ ID NO: 54484 - DNA, 27 bp, Artificial Sequence
  Probe
ggttcagtggtagaattctcgcctgcc

SEQ ID NO: 54485 - DNA, 29 bp, Artificial Sequence
  Probe
ggttcagtggtagaattctcgcctgccac

SEQ ID NO: 54486 - DNA, 30 bp, Artificial Sequence
  Probe
ggttcagtggtagaattctcgcctgccacg

SEQ ID NO: 54487 - DNA, 32 bp, Artificial Sequence; identical to SEQ ID NO: 22296
  Probe

SEQ ID NO: 54488 - DNA, 40 bp, Artificial Sequence; identical to SEQ ID NO: 13957
  Probe

SEQ ID NO: 54489 - DNA, 31 bp, Artificial Sequence; identical to SEQ ID NO: 1432
  Probe

SEQ ID NO: 54490 - DNA, 50 bp, Artificial Sequence; identical to SEQ ID NO: 6812
  Probe

SEQ ID NO: 54491 - DNA, 24 bp, Artificial Sequence
  Probe
ggttccatagtgtagtggttatca

SEQ ID NO: 54492 - DNA, 25 bp, Artificial Sequence
  Probe
ggttccatagtgtagtggttatcac

SEQ ID NO: 54493 - DNA, 26 bp, Artificial Sequence
  Probe
ggttccatagtgtagtggttatcaca

SEQ ID NO: 54494 - DNA, 31 bp, Artificial Sequence; identical to SEQ ID NO: 1443
  Probe

SEQ ID NO: 54495 - DNA, 26 bp, Artificial Sequence
  Probe
ggttccatagtgtagtggttatcacg

SEQ ID NO: 54496 - DNA, 27 bp, Artificial Sequence
  Probe
ggttccatagtgtagtggttatcacgt

SEQ ID NO: 54497 - DNA, 29 bp, Artificial Sequence
  Probe
ggttccatagtgtagtggttatcacgtct

SEQ ID NO: 54498 - DNA, 30 bp, Artificial Sequence; identical to SEQ ID NO: 1451
  Probe

SEQ ID NO: 54499 - DNA, 32 bp, Artificial Sequence; identical to SEQ ID NO: 1453
  Probe

SEQ ID NO: 54500 - DNA, 33 bp, Artificial Sequence; identical to SEQ ID NO: 1454
  Probe

SEQ ID NO: 54501 - DNA, 34 bp, Artificial Sequence; identical to SEQ ID NO: 1455
  Probe

SEQ ID NO: 54502 - DNA, 39 bp, Artificial Sequence; identical to SEQ ID NO: 6819
  Probe

SEQ ID NO: 54503 - DNA, 23 bp, Artificial Sequence
  Probe
ggttccatggtgtaatggttagc

SEQ ID NO: 54504 - DNA, 29 bp, Artificial Sequence
  Probe
ggttccatggtgtaatggttagcactctg

SEQ ID NO: 54505 - DNA, 30 bp, Artificial Sequence; identical to SEQ ID NO: 6826
  Probe

SEQ ID NO: 54506 - DNA, 50 bp, Artificial Sequence; identical to SEQ ID NO: 25533
  Probe

SEQ ID NO: 54507 - DNA, 25 bp, Artificial Sequence
  Probe
ggttcgattccccgacggggaggca

SEQ ID NO: 54508 - DNA, 25 bp, Artificial Sequence
  Probe
ggttcgattctcatagtcctagaaa

SEQ ID NO: 54509 - DNA, 25 bp, Artificial Sequence
  Probe
ggttgtagtccgtgcgagaataatg

SEQ ID NO: 54510 - DNA, 38 bp, Artificial Sequence; identical to SEQ ID NO: 6871
  Probe

SEQ ID NO: 54511 - DNA, 20 bp, Artificial Sequence
  Probe
gtaaacaggagatcctgggt

SEQ ID NO: 54512 - DNA, 20 bp, Artificial Sequence
  Probe
gtaaaccaggggtcgcgagt

SEQ ID NO: 54513 - DNA, 21 bp, Artificial Sequence
  Probe
gtaaaccaggggtcgcgagtt

SEQ ID NO: 54514 - DNA, 20 bp, Artificial Sequence
  Probe
gtaaaccgaagatcacgggt

SEQ ID NO: 54515 - DNA, 20 bp, Artificial Sequence
  Probe
gtaaaccgaagatcgcgggt

SEQ ID NO: 54516 - DNA, 37 bp, Artificial Sequence; identical to SEQ ID NO: 6880
  Probe

SEQ ID NO: 54517 - DNA, 38 bp, Artificial Sequence; identical to SEQ ID NO: 6881
  Probe

SEQ ID NO: 54518 - DNA, 42 bp, Artificial Sequence; identical to SEQ ID NO: 6884
  Probe

SEQ ID NO: 54519 - DNA, 45 bp, Artificial Sequence; identical to SEQ ID NO: 6886
  Probe

SEQ ID NO: 54520 - DNA, 40 bp, Artificial Sequence; identical to SEQ ID NO: 6888
  Probe

SEQ ID NO: 54521 - DNA, 31 bp, Artificial Sequence; identical to SEQ ID NO: 6892
  Probe

SEQ ID NO: 54522 - DNA, 32 bp, Artificial Sequence; identical to SEQ ID NO: 6893
  Probe

SEQ ID NO: 54523 - DNA, 33 bp, Artificial Sequence; identical to SEQ ID NO: 6894
  Probe

SEQ ID NO: 54524 - DNA, 34 bp, Artificial Sequence; identical to SEQ ID NO: 6895
  Probe

SEQ ID NO: 54525 - DNA, 35 bp, Artificial Sequence; identical to SEQ ID NO: 6896
  Probe

SEQ ID NO: 54526 - DNA, 36 bp, Artificial Sequence; identical to SEQ ID NO: 6897
  Probe

SEQ ID NO: 54527 - DNA, 37 bp, Artificial Sequence; identical to SEQ ID NO: 6898
  Probe

SEQ ID NO: 54528 - DNA, 43 bp, Artificial Sequence; identical to SEQ ID NO: 6903
  Probe

SEQ ID NO: 54529 - DNA, 44 bp, Artificial Sequence; identical to SEQ ID NO: 6904
  Probe

SEQ ID NO: 54530 - DNA, 45 bp, Artificial Sequence; identical to SEQ ID NO: 6905
  Probe

SEQ ID NO: 54531 - DNA, 46 bp, Artificial Sequence; identical to SEQ ID NO: 6906
  Probe

SEQ ID NO: 54532 - DNA, 50 bp, Artificial Sequence; identical to SEQ ID NO: 6907
  Probe

SEQ ID NO: 54533 - DNA, 20 bp, Artificial Sequence
  Probe
gtaatggttagcactctgga

SEQ ID NO: 54534 - DNA, 50 bp, Artificial Sequence; identical to SEQ ID NO: 1465
  Probe

SEQ ID NO: 54535 - DNA, 31 bp, Artificial Sequence; identical to SEQ ID NO: 22440
  Probe

SEQ ID NO: 54536 - DNA, 47 bp, Artificial Sequence
  Probe
gtagaattctcgcctgccacgcgggaggcccgggttcgattcccggc

SEQ ID NO: 54537 - DNA, 50 bp, Artificial Sequence; identical to SEQ ID NO: 22442
  Probe

SEQ ID NO: 54538 - DNA, 36 bp, Artificial Sequence; identical to SEQ ID NO: 22446
  Probe

SEQ ID NO: 54539 - DNA, 21 bp, Artificial Sequence
  Probe
gtagtccgtgcgagaataatg

SEQ ID NO: 54540 - DNA, 16 bp, Artificial Sequence
  Probe
gtagtggtatcatgca

SEQ ID NO: 54541 - DNA, 19 bp, Artificial Sequence
  Probe
gtagtggtatcatgcaaga

SEQ ID NO: 54542 - DNA, 38 bp, Artificial Sequence
  Probe
gtagtggtatcatgcaagattcccattcttgcgacccg

SEQ ID NO: 54543 - DNA, 17 bp, Artificial Sequence
  Probe
gtagtggttatcacgtt

SEQ ID NO: 54544 - DNA, 43 bp, Artificial Sequence; identical to SEQ ID NO: 22465
  Probe

SEQ ID NO: 54545 - DNA, 26 bp, Artificial Sequence
  Probe
gtagtgtagtggttatcacgttcgcc

SEQ ID NO: 54546 - DNA, 31 bp, Artificial Sequence; identical to SEQ ID NO: 22485
  Probe

SEQ ID NO: 54547 - DNA, 36 bp, Artificial Sequence; identical to SEQ ID NO: 22487
  Probe

SEQ ID NO: 54548 - DNA, 28 bp, Artificial Sequence
  Probe
gtatccccgcctgtcacgcgggagaccg

SEQ ID NO: 54549 - DNA, 38 bp, Artificial Sequence; identical to SEQ ID NO: 22501
  Probe

SEQ ID NO: 54550 - DNA, 31 bp, Artificial Sequence; identical to SEQ ID NO: 22513
  Probe

SEQ ID NO: 54551 - DNA, 32 bp, Artificial Sequence; identical to SEQ ID NO: 6929
  Probe

SEQ ID NO: 54552 - DNA, 33 bp, Artificial Sequence; identical to SEQ ID NO: 6930
  Probe

SEQ ID NO: 54553 - DNA, 37 bp, Artificial Sequence; identical to SEQ ID NO: 22519
  Probe

SEQ ID NO: 54554 - DNA, 38 bp, Artificial Sequence
  Probe
gtatgattctcgcttagggtgcgagaggtcccgggttc

SEQ ID NO: 54555 - DNA, 39 bp, Artificial Sequence
  Probe
gtatgattctcgcttagggtgcgagaggtcccgggttca

SEQ ID NO: 54556 - DNA, 31 bp, Artificial Sequence; identical to SEQ ID NO: 22520
  Probe

SEQ ID NO: 54557 - DNA, 32 bp, Artificial Sequence; identical to SEQ ID NO: 6931
  Probe

SEQ ID NO: 54558 - DNA, 33 bp, Artificial Sequence; identical to SEQ ID NO: 6932
  Probe

SEQ ID NO: 54559 - DNA, 37 bp, Artificial Sequence; identical to SEQ ID NO: 6933
  Probe

SEQ ID NO: 54560 - DNA, 38 bp, Artificial Sequence
  Probe
gtatgattctcgcttcgggtgcgagaggtcccgggttc

SEQ ID NO: 54561 - DNA, 39 bp, Artificial Sequence
  Probe
gtatgattctcgcttcgggtgcgagaggtcccgggttca

SEQ ID NO: 54562 - DNA, 31 bp, Artificial Sequence; identical to SEQ ID NO: 22525
  Probe

SEQ ID NO: 54563 - DNA, 32 bp, Artificial Sequence; identical to SEQ ID NO: 1472
  Probe

SEQ ID NO: 54564 - DNA, 33 bp, Artificial Sequence; identical to SEQ ID NO: 6934
  Probe

SEQ ID NO: 54565 - DNA, 37 bp, Artificial Sequence; identical to SEQ ID NO: 14023
  Probe

SEQ ID NO: 54566 - DNA, 38 bp, Artificial Sequence
  Probe
gtatgattctcgctttgggtgcgagaggtcccgggttc

SEQ ID NO: 54567 - DNA, 39 bp, Artificial Sequence
  Probe
gtatgattctcgctttgggtgcgagaggtcccgggttca

SEQ ID NO: 54568 - DNA, 31 bp, Artificial Sequence
  Probe
gtatgattctcggtttgggtccgagaggtcc

SEQ ID NO: 54569 - DNA, 37 bp, Artificial Sequence
  Probe
gtatgattctcggtttgggtccgagaggtcccgggtt

SEQ ID NO: 54570 - DNA, 42 bp, Artificial Sequence; identical to SEQ ID NO: 6950
  Probe

SEQ ID NO: 54571 - DNA, 18 bp, Artificial Sequence
  Probe
gtcacggtggccgagtgg

SEQ ID NO: 54572 - DNA, 20 bp, Artificial Sequence
  Probe
gtcacggtggccgagtggtt

SEQ ID NO: 54573 - DNA, 31 bp, Artificial Sequence; identical to SEQ ID NO: 6959
  Probe

SEQ ID NO: 54574 - DNA, 26 bp, Artificial Sequence
  Probe
gtcagctaaataagctatcgggccca

SEQ ID NO: 54575 - DNA, 28 bp, Artificial Sequence
  Probe
gtcagctaaataagctatcgggcccata

SEQ ID NO: 54576 - DNA, 29 bp, Artificial Sequence
  Probe
gtcagctaaataagctatcgggcccatac

SEQ ID NO: 54577 - DNA, 36 bp, Artificial Sequence; identical to SEQ ID NO: 6967
  Probe

SEQ ID NO: 54578 - DNA, 37 bp, Artificial Sequence; identical to SEQ ID NO: 6968
  Probe

SEQ ID NO: 54579 - DNA, 38 bp, Artificial Sequence; identical to SEQ ID NO: 6969
  Probe

SEQ ID NO: 54580 - DNA, 39 bp, Artificial Sequence; identical to SEQ ID NO: 6970
  Probe

SEQ ID NO: 54581 - DNA, 40 bp, Artificial Sequence; identical to SEQ ID NO: 6971
  Probe

SEQ ID NO: 54582 - DNA, 41 bp, Artificial Sequence; identical to SEQ ID NO: 6972
  Probe

SEQ ID NO: 54583 - DNA, 18 bp, Artificial Sequence
  Probe
gtcaggatggccgagcgg

SEQ ID NO: 54584 - DNA, 19 bp, Artificial Sequence
  Probe
gtcaggatggccgagcggt

SEQ ID NO: 54585 - DNA, 20 bp, Artificial Sequence
  Probe
gtcaggatggccgagcggtc

SEQ ID NO: 54586 - DNA, 21 bp, Artificial Sequence
  Probe
gtcaggatggccgagcggtct

SEQ ID NO: 54587 - DNA, 22 bp, Artificial Sequence
  Probe
gtcaggatggccgagcggtcta

SEQ ID NO: 54588 - DNA, 23 bp, Artificial Sequence
  Probe
gtcaggatggccgagcggtctaa

SEQ ID NO: 54589 - DNA, 24 bp, Artificial Sequence
  Probe
gtcaggatggccgagcggtctaag

SEQ ID NO: 54590 - DNA, 25 bp, Artificial Sequence
  Probe
gtcaggatggccgagcggtctaagg

SEQ ID NO: 54591 - DNA, 18 bp, Artificial Sequence
  Probe
gtcaggatggccgagtgg

SEQ ID NO: 54592 - DNA, 22 bp, Artificial Sequence
  Probe
gtcaggatggccgagtggtcta

SEQ ID NO: 54593 - DNA, 25 bp, Artificial Sequence
  Probe
gtcaggatggccgagtggtctaagg

SEQ ID NO: 54594 - DNA, 20 bp, Artificial Sequence
  Probe
gtcatgggtggttgcgtttt

SEQ ID NO: 54595 - DNA, 21 bp, Artificial Sequence
  Probe
gtcatgggtggttgcgttttg

SEQ ID NO: 54596 - DNA, 22 bp, Artificial Sequence
  Probe
gtcatgggtggttgcgttttgg

SEQ ID NO: 54597 - DNA, 23 bp, Artificial Sequence
  Probe
gtcatgggtggttgcgttttgga

SEQ ID NO: 54598 - DNA, 18 bp, Artificial Sequence
  Probe
gtccctgtccaggcgcta

SEQ ID NO: 54599 - DNA, 16 bp, Artificial Sequence
  Probe
gtccttgtagtataaa

SEQ ID NO: 54600 - DNA, 26 bp, Artificial Sequence
  Probe
gtccttgtagtataaactaatacacc

SEQ ID NO: 54601 - DNA, 27 bp, Artificial Sequence
  Probe
gtccttgtagtataaactaatacacca

SEQ ID NO: 54602 - DNA, 28 bp, Artificial Sequence
  Probe
gtccttgtagtataaactaatacaccag

SEQ ID NO: 54603 - DNA, 30 bp, Artificial Sequence; identical to SEQ ID NO: 1487
  Probe

SEQ ID NO: 54604 - DNA, 31 bp, Artificial Sequence; identical to SEQ ID NO: 1488
  Probe

SEQ ID NO: 54605 - DNA, 32 bp, Artificial Sequence; identical to SEQ ID NO: 7010
  Probe

SEQ ID NO: 54606 - DNA, 33 bp, Artificial Sequence; identical to SEQ ID NO: 7011
  Probe

SEQ ID NO: 54607 - DNA, 34 bp, Artificial Sequence; identical to SEQ ID NO: 7012
  Probe

SEQ ID NO: 54608 - DNA, 37 bp, Artificial Sequence
  Probe
gtccttgtagtataaactaatacaccagtcttgtaaa

SEQ ID NO: 54609 - DNA, 38 bp, Artificial Sequence
  Probe
gtccttgtagtataaactaatacaccagtcttgtaaac

SEQ ID NO: 54610 - DNA, 50 bp, Artificial Sequence; identical to SEQ ID NO: 1489
  Probe

SEQ ID NO: 54611 - DNA, 18 bp, Artificial Sequence
  Probe
gtcggtagagcatcagac

SEQ ID NO: 54612 - DNA, 16 bp, Artificial Sequence
  Probe
gtcggtagagcatgag

SEQ ID NO: 54613 - DNA, 18 bp, Artificial Sequence
  Probe
gtcggtagagcatgagac

SEQ ID NO: 54614 - DNA, 35 bp, Artificial Sequence; identical to SEQ ID NO: 1492
  Probe

SEQ ID NO: 54615 - DNA, 20 bp, Artificial Sequence
  Probe
gtcggtagagcatgggactc

SEQ ID NO: 54616 - DNA, 26 bp, Artificial Sequence
  Probe
gtcggtagagcatgggactcttaatc

SEQ ID NO: 54617 - DNA, 28 bp, Artificial Sequence
  Probe
gtcggtagagcatgggactcttaatccc

SEQ ID NO: 54618 - DNA, 35 bp, Artificial Sequence; identical to SEQ ID NO: 1495
  Probe

SEQ ID NO: 54619 - DNA, 36 bp, Artificial Sequence; identical to SEQ ID NO: 22678
  Probe

SEQ ID NO: 54620 - DNA, 40 bp, Artificial Sequence; identical to SEQ ID NO: 14063
  Probe

SEQ ID NO: 54621 - DNA, 30 bp, Artificial Sequence; identical to SEQ ID NO: 7024
  Probe

SEQ ID NO: 54622 - DNA, 25 bp, Artificial Sequence
  Probe
gtctaacaacatggctttctcaact

SEQ ID NO: 54623 - DNA, 21 bp, Artificial Sequence
  Probe
gtctaggggtatgattctcgc

SEQ ID NO: 54624 - DNA, 22 bp, Artificial Sequence
  Probe
gtctaggggtatgattctcgct

SEQ ID NO: 54625 - DNA, 40 bp, Artificial Sequence
  Probe
gtctagtggttaggattcggcgctctcaccgccgcggccc

SEQ ID NO: 54626 - DNA, 23 bp, Artificial Sequence
  Probe
gtctcataatctgaaggtcctga

SEQ ID NO: 54627 - DNA, 25 bp, Artificial Sequence
  Probe
gtctcataatctgaaggtcctgagt

SEQ ID NO: 54628 - DNA, 22 bp, Artificial Sequence
  Probe
gtctcataatctgaaggtcgtg

SEQ ID NO: 54629 - DNA, 24 bp, Artificial Sequence
  Probe
gtctcataatctgaaggtcgtgag

SEQ ID NO: 54630 - DNA, 26 bp, Artificial Sequence
  Probe
gtctcataatctgaaggtcgtgagtt

SEQ ID NO: 54631 - DNA, 27 bp, Artificial Sequence
  Probe
gtctcataatctgaaggtcgtgagttc

SEQ ID NO: 54632 - DNA, 27 bp, Artificial Sequence
  Probe
gtctccatctattgatgagggtcttac

SEQ ID NO: 54633 - DNA, 25 bp, Artificial Sequence
  Probe
gtctcgtaaaccgaagatcacgggt

SEQ ID NO: 54634 - DNA, 37 bp, Artificial Sequence; identical to SEQ ID NO: 49749
  Probe

SEQ ID NO: 54635 - DNA, 42 bp, Artificial Sequence; identical to SEQ ID NO: 7048
  Probe

SEQ ID NO: 54636 - DNA, 33 bp, Artificial Sequence; identical to SEQ ID NO: 14073
  Probe

SEQ ID NO: 54637 - DNA, 18 bp, Artificial Sequence
  Probe
gtgagtatccccgcctgt

SEQ ID NO: 54638 - DNA, 20 bp, Artificial Sequence
  Probe
gtgagtatccccgcctgtca

SEQ ID NO: 54639 - DNA, 21 bp, Artificial Sequence
  Probe
gtgagtatccccgcctgtcac

SEQ ID NO: 54640 - DNA, 31 bp, Artificial Sequence; identical to SEQ ID NO: 14078
  Probe

SEQ ID NO: 54641 - DNA, 32 bp, Artificial Sequence; identical to SEQ ID NO: 22740
  Probe

SEQ ID NO: 54642 - DNA, 27 bp, Artificial Sequence
  Probe
gtgatcgtatagtggttagtactctgc

SEQ ID NO: 54643 - DNA, 17 bp, Artificial Sequence
  Probe
gtgcacttggacgaacc

SEQ ID NO: 54644 - DNA, 26 bp, Artificial Sequence
  Probe
gtgctaataacgccaaggtcgcgggt

SEQ ID NO: 54645 - DNA, 27 bp, Artificial Sequence
  Probe
gtgctaataacgccaaggtcgcgggtt

SEQ ID NO: 54646 - DNA, 26 bp, Artificial Sequence
  Probe
gtgctaataacgctaaggtcgcgggt

SEQ ID NO: 54647 - DNA, 28 bp, Artificial Sequence
  Probe
gtggagttaaagactttttctctgattt

SEQ ID NO: 54648 - DNA, 35 bp, Artificial Sequence; identical to SEQ ID NO: 14087
  Probe

SEQ ID NO: 54649 - DNA, 16 bp, Artificial Sequence
  Probe
gtggtagaattctcgc

SEQ ID NO: 54650 - DNA, 17 bp, Artificial Sequence
  Probe
gtggtagaattctcgcc

SEQ ID NO: 54651 - DNA, 18 bp, Artificial Sequence
  Probe
gtggtagaattctcgcct

SEQ ID NO: 54652 - DNA, 19 bp, Artificial Sequence
  Probe
gtggtagaattctcgcctg

SEQ ID NO: 54653 - DNA, 20 bp, Artificial Sequence
  Probe
gtggtagaattctcgcctgc

SEQ ID NO: 54654 - DNA, 21 bp, Artificial Sequence
  Probe
gtggtagaattctcgcctgcc

SEQ ID NO: 54655 - DNA, 16 bp, Artificial Sequence
  Probe
gtggtatcatgcaaga

SEQ ID NO: 54656 - DNA, 34 bp, Artificial Sequence
  Probe
gtggtatcatgcaagattcccattcttgcgaccc

SEQ ID NO: 54657 - DNA, 40 bp, Artificial Sequence; identical to SEQ ID NO: 22822
  Probe

SEQ ID NO: 54658 - DNA, 16 bp, Artificial Sequence
  Probe
gtggtgagtatccccg

SEQ ID NO: 54659 - DNA, 36 bp, Artificial Sequence; identical to SEQ ID NO: 14097
  Probe

SEQ ID NO: 54660 - DNA, 35 bp, Artificial Sequence; identical to SEQ ID NO: 22844
  Probe

SEQ ID NO: 54661 - DNA, 16 bp, Artificial Sequence
  Probe
gtggttaggattcggc

SEQ ID NO: 54662 - DNA, 24 bp, Artificial Sequence
  Probe
gtggttaggattcggcgctctcac

SEQ ID NO: 54663 - DNA, 25 bp, Artificial Sequence
  Probe
gtggttaggattcggcgctctcacc

SEQ ID NO: 54664 - DNA, 28 bp, Artificial Sequence
  Probe
gtggttaggattcggcgctctcaccgcc

SEQ ID NO: 54665 - DNA, 34 bp, Artificial Sequence; identical to SEQ ID NO: 33195
  Probe

SEQ ID NO: 54666 - DNA, 36 bp, Artificial Sequence; identical to SEQ ID NO: 22856
  Probe

SEQ ID NO: 54667 - DNA, 17 bp, Artificial Sequence
  Probe
gtggttagtactctgcg

SEQ ID NO: 54668 - DNA, 18 bp, Artificial Sequence
  Probe
gtggttagtactctgcgt

SEQ ID NO: 54669 - DNA, 40 bp, Artificial Sequence; identical to SEQ ID NO: 22865
  Probe

SEQ ID NO: 54670 - DNA, 40 bp, Artificial Sequence; identical to SEQ ID NO: 14115
  Probe

SEQ ID NO: 54671 - DNA, 27 bp, Artificial Sequence
  Probe
gtggttgtagtccgtgcgagaataatg

SEQ ID NO: 54672 - DNA, 21 bp, Artificial Sequence
  Probe
gtgtagtggtatcatgcaaga

SEQ ID NO: 54673 - DNA, 45 bp, Artificial Sequence; identical to SEQ ID NO: 7103
  Probe

SEQ ID NO: 54674 - DNA, 23 bp, Artificial Sequence
  Probe
gtgtgaatccttcgatagctcag

SEQ ID NO: 54675 - DNA, 26 bp, Artificial Sequence
  Probe
gtgtttgtgggtttaagtcccattgg

SEQ ID NO: 54676 - DNA, 27 bp, Artificial Sequence
  Probe
gtgtttgtgggtttaagtcccattggt

SEQ ID NO: 54677 - DNA, 29 bp, Artificial Sequence
  Probe
gtgtttgtgggtttaagtcccattggtct

SEQ ID NO: 54678 - DNA, 40 bp, Artificial Sequence; identical to SEQ ID NO: 7120
  Probe

SEQ ID NO: 54679 - DNA, 42 bp, Artificial Sequence; identical to SEQ ID NO: 7122
  Probe

SEQ ID NO: 54680 - DNA, 42 bp, Artificial Sequence
  Probe
gttaaccgaaaggttggtggttcgagcccacccagggacgcc

SEQ ID NO: 54681 - DNA, 43 bp, Artificial Sequence; identical to SEQ ID NO: 22936
  Probe

SEQ ID NO: 54682 - DNA, 43 bp, Artificial Sequence; identical to SEQ ID NO: 7129
  Probe

SEQ ID NO: 54683 - DNA, 35 bp, Artificial Sequence; identical to SEQ ID NO: 7139
  Probe

SEQ ID NO: 54684 - DNA, 42 bp, Artificial Sequence; identical to SEQ ID NO: 1524
  Probe

SEQ ID NO: 54685 - DNA, 43 bp, Artificial Sequence; identical to SEQ ID NO: 7143
  Probe

SEQ ID NO: 54686 - DNA, 44 bp, Artificial Sequence; identical to SEQ ID NO: 22962
  Probe

SEQ ID NO: 54687 - DNA, 50 bp, Artificial Sequence; identical to SEQ ID NO: 7145
  Probe

SEQ ID NO: 54688 - DNA, 32 bp, Artificial Sequence; identical to SEQ ID NO: 14122
  Probe

SEQ ID NO: 54689 - DNA, 32 bp, Artificial Sequence; identical to SEQ ID NO: 22966
  Probe

SEQ ID NO: 54690 - DNA, 30 bp, Artificial Sequence; identical to SEQ ID NO: 14124
  Probe

SEQ ID NO: 54691 - DNA, 24 bp, Artificial Sequence
  Probe
gttcgattccccgacggggaggca

SEQ ID NO: 54692 - DNA, 24 bp, Artificial Sequence
  Probe
gttcgattctcatagtcctagaaa

SEQ ID NO: 54693 - DNA, 26 bp, Artificial Sequence
  Probe
gttcttgtagttgaaatacaacgatg

SEQ ID NO: 54694 - DNA, 27 bp, Artificial Sequence
  Probe
gttcttgtagttgaaatacaacgatgg

SEQ ID NO: 54695 - DNA, 29 bp, Artificial Sequence
  Probe
gttcttgtagttgaaatacaacgatggtt

SEQ ID NO: 54696 - DNA, 30 bp, Artificial Sequence; identical to SEQ ID NO: 7195
  Probe

SEQ ID NO: 54697 - DNA, 36 bp, Artificial Sequence; identical to SEQ ID NO: 23017
  Probe

SEQ ID NO: 54698 - DNA, 38 bp, Artificial Sequence; identical to SEQ ID NO: 7200
  Probe

SEQ ID NO: 54699 - DNA, 39 bp, Artificial Sequence; identical to SEQ ID NO: 33415
  Probe

SEQ ID NO: 54700 - DNA, 42 bp, Artificial Sequence; identical to SEQ ID NO: 7201
  Probe

SEQ ID NO: 54701 - DNA, 46 bp, Artificial Sequence; identical to SEQ ID NO: 1528
  Probe

SEQ ID NO: 54702 - DNA, 50 bp, Artificial Sequence; identical to SEQ ID NO: 1529
  Probe

SEQ ID NO: 54703 - DNA, 34 bp, Artificial Sequence; identical to SEQ ID NO: 7208
  Probe

SEQ ID NO: 54704 - DNA, 24 bp, Artificial Sequence
  Probe
gttgtagtccgtgcgagaataatg

SEQ ID NO: 54705 - DNA, 25 bp, Artificial Sequence
  Probe
gtttagacgggctcacatcacccca

SEQ ID NO: 54706 - DNA, 27 bp, Artificial Sequence
  Probe
gtttagacgggctcacatcaccccata

SEQ ID NO: 54707 - DNA, 34 bp, Artificial Sequence; identical to SEQ ID NO: 7239
  Probe

SEQ ID NO: 54708 - DNA, 30 bp, Artificial Sequence; identical to SEQ ID NO: 1536
  Probe

SEQ ID NO: 54709 - DNA, 32 bp, Artificial Sequence; identical to SEQ ID NO: 7245
  Probe

SEQ ID NO: 54710 - DNA, 35 bp, Artificial Sequence; identical to SEQ ID NO: 1539
  Probe

SEQ ID NO: 54711 - DNA, 36 bp, Artificial Sequence; identical to SEQ ID NO: 1540
  Probe

SEQ ID NO: 54712 - DNA, 37 bp, Artificial Sequence; identical to SEQ ID NO: 1541
  Probe

SEQ ID NO: 54713 - DNA, 23 bp, Artificial Sequence
  Probe
gtttccgtagtgtagcggttatc

SEQ ID NO: 54714 - DNA, 24 bp, Artificial Sequence
  Probe
gtttccgtagtgtagcggttatca

SEQ ID NO: 54715 - DNA, 26 bp, Artificial Sequence
  Probe
gtttccgtagtgtagcggttatcaca

SEQ ID NO: 54716 - DNA, 29 bp, Artificial Sequence
  Probe
gtttccgtagtgtagcggttatcacattc

SEQ ID NO: 54717 - DNA, 30 bp, Artificial Sequence; identical to SEQ ID NO: 8769
  Probe

SEQ ID NO: 54718 - DNA, 31 bp, Artificial Sequence; identical to SEQ ID NO: 1547
  Probe

SEQ ID NO: 54719 - DNA, 32 bp, Artificial Sequence; identical to SEQ ID NO: 1548
  Probe

SEQ ID NO: 54720 - DNA, 33 bp, Artificial Sequence; identical to SEQ ID NO: 1549
  Probe

SEQ ID NO: 54721 - DNA, 50 bp, Artificial Sequence; identical to SEQ ID NO: 7255
  Probe

SEQ ID NO: 54722 - DNA, 17 bp, Artificial Sequence
  Probe
gtttccgtagtgtagtg

SEQ ID NO: 54723 - DNA, 23 bp, Artificial Sequence
  Probe
gtttccgtagtgtagtggtcatc

SEQ ID NO: 54724 - DNA, 24 bp, Artificial Sequence
  Probe
gtttccgtagtgtagtggtcatca

SEQ ID NO: 54725 - DNA, 33 bp, Artificial Sequence; identical to SEQ ID NO: 1561
  Probe

SEQ ID NO: 54726 - DNA, 50 bp, Artificial Sequence; identical to SEQ ID NO: 7263
  Probe

SEQ ID NO: 54727 - DNA, 22 bp, Artificial Sequence
  Probe
gtttccgtagtgtagtggttat

SEQ ID NO: 54728 - DNA, 23 bp, Artificial Sequence
  Probe
gtttccgtagtgtagtggttatc

SEQ ID NO: 54729 - DNA, 24 bp, Artificial Sequence
  Probe
gtttccgtagtgtagtggttatca

SEQ ID NO: 54730 - DNA, 25 bp, Artificial Sequence
  Probe
gtttccgtagtgtagtggttatcac

SEQ ID NO: 54731 - DNA, 26 bp, Artificial Sequence
  Probe
gtttccgtagtgtagtggttatcacg

SEQ ID NO: 54732 - DNA, 27 bp, Artificial Sequence
  Probe
gtttccgtagtgtagtggttatcacgt

SEQ ID NO: 54733 - DNA, 28 bp, Artificial Sequence
  Probe
gtttccgtagtgtagtggttatcacgtt

SEQ ID NO: 54734 - DNA, 29 bp, Artificial Sequence
  Probe
gtttccgtagtgtagtggttatcacgttc

SEQ ID NO: 54735 - DNA, 30 bp, Artificial Sequence; identical to SEQ ID NO: 7273
  Probe

SEQ ID NO: 54736 - DNA, 31 bp, Artificial Sequence; identical to SEQ ID NO: 7274
  Probe

SEQ ID NO: 54737 - DNA, 32 bp, Artificial Sequence; identical to SEQ ID NO: 7275
  Probe

SEQ ID NO: 54738 - DNA, 33 bp, Artificial Sequence; identical to SEQ ID NO: 7276
  Probe

SEQ ID NO: 54739 - DNA, 41 bp, Artificial Sequence; identical to SEQ ID NO: 23126
  Probe

SEQ ID NO: 54740 - DNA, 42 bp, Artificial Sequence; identical to SEQ ID NO: 33531
  Probe

SEQ ID NO: 54741 - DNA, 44 bp, Artificial Sequence
  Probe
gtttccgtagtgtagtggttatcacgttcgcctaacacgcgaaa

SEQ ID NO: 54742 - DNA, 50 bp, Artificial Sequence; identical to SEQ ID NO: 7277
  Probe

SEQ ID NO: 54743 - DNA, 34 bp, Artificial Sequence; identical to SEQ ID NO: 7278
  Probe

SEQ ID NO: 54744 - DNA, 35 bp, Artificial Sequence; identical to SEQ ID NO: 7279
  Probe

SEQ ID NO: 54745 - DNA, 37 bp, Artificial Sequence; identical to SEQ ID NO: 7281
  Probe

SEQ ID NO: 54746 - DNA, 38 bp, Artificial Sequence; identical to SEQ ID NO: 1563
  Probe

SEQ ID NO: 54747 - DNA, 40 bp, Artificial Sequence; identical to SEQ ID NO: 14160
  Probe

SEQ ID NO: 54748 - DNA, 41 bp, Artificial Sequence; identical to SEQ ID NO: 23134
  Probe

SEQ ID NO: 54749 - DNA, 42 bp, Artificial Sequence; identical to SEQ ID NO: 23135
  Probe

SEQ ID NO: 54750 - DNA, 49 bp, Artificial Sequence; identical to SEQ ID NO: 14161
  Probe

SEQ ID NO: 54751 - DNA, 23 bp, Artificial Sequence
  Probe
gtttccgtagtgtagtggttatt

SEQ ID NO: 54752 - DNA, 15 bp, Artificial Sequence
  Probe
gtttgtgggtttaag

SEQ ID NO: 54753 - DNA, 17 bp, Artificial Sequence
  Probe
gtttgtgggtttaagtc

SEQ ID NO: 54754 - DNA, 18 bp, Artificial Sequence
  Probe
gtttgtgggtttaagtcc

SEQ ID NO: 54755 - DNA, 22 bp, Artificial Sequence
  Probe
gtttgtgggtttaagtcccatt

SEQ ID NO: 54756 - DNA, 23 bp, Artificial Sequence
  Probe
gtttgtgggtttaagtcccattg

SEQ ID NO: 54757 - DNA, 24 bp, Artificial Sequence
  Probe
gtttgtgggtttaagtcccattgg

SEQ ID NO: 54758 - DNA, 25 bp, Artificial Sequence
  Probe
gtttgtgggtttaagtcccattggt

SEQ ID NO: 54759 - DNA, 26 bp, Artificial Sequence
  Probe
gtttgtgggtttaagtcccattggtc

SEQ ID NO: 54760 - DNA, 27 bp, Artificial Sequence
  Probe
gtttgtgggtttaagtcccattggtct

SEQ ID NO: 54761 - DNA, 28 bp, Artificial Sequence
  Probe
gtttgtgggtttaagtcccattggtcta

SEQ ID NO: 54762 - DNA, 29 bp, Artificial Sequence
  Probe
gtttgtgggtttaagtcccattggtctag

SEQ ID NO: 54763 - DNA, 30 bp, Artificial Sequence; identical to SEQ ID NO: 7300
  Probe

SEQ ID NO: 54764 - DNA, 31 bp, Artificial Sequence; identical to SEQ ID NO: 7301
  Probe

SEQ ID NO: 54765 - DNA, 32 bp, Artificial Sequence; identical to SEQ ID NO: 7302
  Probe

SEQ ID NO: 54766 - DNA, 33 bp, Artificial Sequence; identical to SEQ ID NO: 7303
  Probe

SEQ ID NO: 54767 - DNA, 34 bp, Artificial Sequence; identical to SEQ ID NO: 7304
  Probe

SEQ ID NO: 54768 - DNA, 19 bp, Artificial Sequence
  Probe
gttttcacccaggcggccc

SEQ ID NO: 54769 - DNA, 46 bp, Artificial Sequence; identical to SEQ ID NO: 7307
  Probe

SEQ ID NO: 54770 - DNA, 36 bp, Artificial Sequence; identical to SEQ ID NO: 7311
  Probe

SEQ ID NO: 54771 - DNA, 38 bp, Artificial Sequence; identical to SEQ ID NO: 7312
  Probe

SEQ ID NO: 54772 - DNA, 39 bp, Artificial Sequence; identical to SEQ ID NO: 7313
  Probe

SEQ ID NO: 54773 - DNA, 40 bp, Artificial Sequence; identical to SEQ ID NO: 23177
  Probe

SEQ ID NO: 54774 - DNA, 43 bp, Artificial Sequence; identical to SEQ ID NO: 7315
  Probe

SEQ ID NO: 54775 - DNA, 32 bp, Artificial Sequence; identical to SEQ ID NO: 23182
  Probe

SEQ ID NO: 54776 - DNA, 36 bp, Artificial Sequence; identical to SEQ ID NO: 23185
  Probe

SEQ ID NO: 54777 - DNA, 37 bp, Artificial Sequence; identical to SEQ ID NO: 7317
  Probe

SEQ ID NO: 54778 - DNA, 39 bp, Artificial Sequence; identical to SEQ ID NO: 7318
  Probe

SEQ ID NO: 54779 - DNA, 50 bp, Artificial Sequence; identical to SEQ ID NO: 7321
  Probe

SEQ ID NO: 54780 - DNA, 36 bp, Artificial Sequence; identical to SEQ ID NO: 7329
  Probe

SEQ ID NO: 54781 - DNA, 28 bp, Artificial Sequence
  Probe
taaacctagccccaaacccactccacct

SEQ ID NO: 54782 - DNA, 33 bp, Artificial Sequence; identical to SEQ ID NO: 23198
  Probe

SEQ ID NO: 54783 - DNA, 35 bp, Artificial Sequence; identical to SEQ ID NO: 23201
  Probe

SEQ ID NO: 54784 - DNA, 38 bp, Artificial Sequence; identical to SEQ ID NO: 7332
  Probe

SEQ ID NO: 54785 - DNA, 32 bp, Artificial Sequence; identical to SEQ ID NO: 7337
  Probe

SEQ ID NO: 54786 - DNA, 33 bp, Artificial Sequence; identical to SEQ ID NO: 7338
  Probe

SEQ ID NO: 54787 - DNA, 26 bp, Artificial Sequence
  Probe
taacacaaagcacccaacttacactt

SEQ ID NO: 54788 - DNA, 30 bp, Artificial Sequence; identical to SEQ ID NO: 7355
  Probe

SEQ ID NO: 54789 - DNA, 31 bp, Artificial Sequence; identical to SEQ ID NO: 23224
  Probe

SEQ ID NO: 54790 - DNA, 32 bp, Artificial Sequence; identical to SEQ ID NO: 7356
  Probe

SEQ ID NO: 54791 - DNA, 33 bp, Artificial Sequence; identical to SEQ ID NO: 23226
  Probe

SEQ ID NO: 54792 - DNA, 50 bp, Artificial Sequence; identical to SEQ ID NO: 1568
  Probe

SEQ ID NO: 54793 - DNA, 22 bp, Artificial Sequence
  Probe
taacacgcgaaaggtccccggt

SEQ ID NO: 54794 - DNA, 30 bp, Artificial Sequence; identical to SEQ ID NO: 7365
  Probe

SEQ ID NO: 54795 - DNA, 31 bp, Artificial Sequence; identical to SEQ ID NO: 7366
  Probe

SEQ ID NO: 54796 - DNA, 32 bp, Artificial Sequence; identical to SEQ ID NO: 7367
  Probe

SEQ ID NO: 54797 - DNA, 33 bp, Artificial Sequence; identical to SEQ ID NO: 7368
  Probe

SEQ ID NO: 54798 - DNA, 34 bp, Artificial Sequence; identical to SEQ ID NO: 23249
  Probe

SEQ ID NO: 54799 - DNA, 35 bp, Artificial Sequence; identical to SEQ ID NO: 23250
  Probe

SEQ ID NO: 54800 - DNA, 36 bp, Artificial Sequence; identical to SEQ ID NO: 23251
  Probe

SEQ ID NO: 54801 - DNA, 37 bp, Artificial Sequence; identical to SEQ ID NO: 7369
  Probe

SEQ ID NO: 54802 - DNA, 38 bp, Artificial Sequence; identical to SEQ ID NO: 7370
  Probe

SEQ ID NO: 54803 - DNA, 39 bp, Artificial Sequence; identical to SEQ ID NO: 7371
  Probe

SEQ ID NO: 54804 - DNA, 40 bp, Artificial Sequence; identical to SEQ ID NO: 7372
  Probe

SEQ ID NO: 54805 - DNA, 44 bp, Artificial Sequence
  Probe
taaccaaaacatcagattgtgaatctgacaacagaggcttacga

SEQ ID NO: 54806 - DNA, 41 bp, Artificial Sequence; identical to SEQ ID NO: 7376
  Probe

SEQ ID NO: 54807 - DNA, 40 bp, Artificial Sequence; identical to SEQ ID NO: 7377
  Probe

SEQ ID NO: 54808 - DNA, 36 bp, Artificial Sequence; identical to SEQ ID NO: 50114
  Probe

SEQ ID NO: 54809 - DNA, 40 bp, Artificial Sequence; identical to SEQ ID NO: 1570
  Probe

SEQ ID NO: 54810 - DNA, 41 bp, Artificial Sequence; identical to SEQ ID NO: 7378
  Probe

SEQ ID NO: 54811 - DNA, 40 bp, Artificial Sequence; identical to SEQ ID NO: 50118
  Probe

SEQ ID NO: 54812 - DNA, 40 bp, Artificial Sequence; identical to SEQ ID NO: 50119
  Probe

SEQ ID NO: 54813 - DNA, 50 bp, Artificial Sequence; identical to SEQ ID NO: 7379
  Probe

SEQ ID NO: 54814 - DNA, 41 bp, Artificial Sequence; identical to SEQ ID NO: 7382
  Probe

SEQ ID NO: 54815 - DNA, 32 bp, Artificial Sequence; identical to SEQ ID NO: 7387
  Probe

SEQ ID NO: 54816 - DNA, 33 bp, Artificial Sequence; identical to SEQ ID NO: 7388
  Probe

SEQ ID NO: 54817 - DNA, 34 bp, Artificial Sequence; identical to SEQ ID NO: 7389
  Probe

SEQ ID NO: 54818 - DNA, 35 bp, Artificial Sequence; identical to SEQ ID NO: 7390
  Probe

SEQ ID NO: 54819 - DNA, 36 bp, Artificial Sequence; identical to SEQ ID NO: 7391
  Probe

SEQ ID NO: 54820 - DNA, 37 bp, Artificial Sequence; identical to SEQ ID NO: 7392
  Probe

SEQ ID NO: 54821 - DNA, 38 bp, Artificial Sequence; identical to SEQ ID NO: 7393
  Probe

SEQ ID NO: 54822 - DNA, 39 bp, Artificial Sequence; identical to SEQ ID NO: 7394
  Probe

SEQ ID NO: 54823 - DNA, 40 bp, Artificial Sequence; identical to SEQ ID NO: 7395
  Probe

SEQ ID NO: 54824 - DNA, 41 bp, Artificial Sequence; identical to SEQ ID NO: 7396
  Probe

SEQ ID NO: 54825 - DNA, 42 bp, Artificial Sequence; identical to SEQ ID NO: 23277
  Probe

SEQ ID NO: 54826 - DNA, 46 bp, Artificial Sequence; identical to SEQ ID NO: 7399
  Probe

SEQ ID NO: 54827 - DNA, 20 bp, Artificial Sequence
  Probe
taacttgaccgctctgagct

SEQ ID NO: 54828 - DNA, 31 bp, Artificial Sequence; identical to SEQ ID NO: 7406
  Probe

SEQ ID NO: 54829 - DNA, 32 bp, Artificial Sequence
  Probe
taagcatagctgccttccaagcagttgacccg

SEQ ID NO: 54830 - DNA, 41 bp, Artificial Sequence; identical to SEQ ID NO: 7411
  Probe

SEQ ID NO: 54831 - DNA, 19 bp, Artificial Sequence
  Probe
taagctatcgggcccatac

SEQ ID NO: 54832 - DNA, 21 bp, Artificial Sequence
  Probe
taagctatcgggcccataccc

SEQ ID NO: 54833 - DNA, 23 bp, Artificial Sequence
  Probe
taagctatcgggcccataccccg

SEQ ID NO: 54834 - DNA, 24 bp, Artificial Sequence
  Probe
taagctatcgggcccataccccga

SEQ ID NO: 54835 - DNA, 25 bp, Artificial Sequence
  Probe
taagctatcgggcccataccccgaa

SEQ ID NO: 54836 - DNA, 26 bp, Artificial Sequence
  Probe
taagctatcgggcccataccccgaaa

SEQ ID NO: 54837 - DNA, 27 bp, Artificial Sequence
  Probe
taagctatcgggcccataccccgaaaa

SEQ ID NO: 54838 - DNA, 28 bp, Artificial Sequence
  Probe
taagctatcgggcccataccccgaaaat

SEQ ID NO: 54839 - DNA, 29 bp, Artificial Sequence
  Probe
taagctatcgggcccataccccgaaaatg

SEQ ID NO: 54840 - DNA, 30 bp, Artificial Sequence; identical to SEQ ID NO: 7423
  Probe

SEQ ID NO: 54841 - DNA, 31 bp, Artificial Sequence; identical to SEQ ID NO: 7424
  Probe

SEQ ID NO: 54842 - DNA, 32 bp, Artificial Sequence; identical to SEQ ID NO: 7425
  Probe

SEQ ID NO: 54843 - DNA, 33 bp, Artificial Sequence; identical to SEQ ID NO: 7426
  Probe

SEQ ID NO: 54844 - DNA, 35 bp, Artificial Sequence; identical to SEQ ID NO: 7428
  Probe

SEQ ID NO: 54845 - DNA, 36 bp, Artificial Sequence; identical to SEQ ID NO: 7429
  Probe

SEQ ID NO: 54846 - DNA, 50 bp, Artificial Sequence; identical to SEQ ID NO: 1573
  Probe

SEQ ID NO: 54847 - DNA, 32 bp, Artificial Sequence; identical to SEQ ID NO: 7441
  Probe

SEQ ID NO: 54848 - DNA, 33 bp, Artificial Sequence; identical to SEQ ID NO: 7442
  Probe

SEQ ID NO: 54849 - DNA, 43 bp, Artificial Sequence; identical to SEQ ID NO: 7449
  Probe

SEQ ID NO: 54850 - DNA, 44 bp, Artificial Sequence; identical to SEQ ID NO: 7450
  Probe

SEQ ID NO: 54851 - DNA, 45 bp, Artificial Sequence; identical to SEQ ID NO: 7451
  Probe

SEQ ID NO: 54852 - DNA, 46 bp, Artificial Sequence; identical to SEQ ID NO: 7452
  Probe

SEQ ID NO: 54853 - DNA, 30 bp, Artificial Sequence; identical to SEQ ID NO: 23324
  Probe

SEQ ID NO: 54854 - DNA, 32 bp, Artificial Sequence; identical to SEQ ID NO: 7457
  Probe

SEQ ID NO: 54855 - DNA, 22 bp, Artificial Sequence
  Probe
taataacgccaaggtcgcgggt

SEQ ID NO: 54856 - DNA, 23 bp, Artificial Sequence
  Probe
taataacgccaaggtcgcgggtt

SEQ ID NO: 54857 - DNA, 50 bp, Artificial Sequence; identical to SEQ ID NO: 7462
  Probe

SEQ ID NO: 54858 - DNA, 50 bp, Artificial Sequence; identical to SEQ ID NO: 7464
  Probe

SEQ ID NO: 54859 - DNA, 22 bp, Artificial Sequence
  Probe
taatctgagggtccagggttca

SEQ ID NO: 54860 - DNA, 15 bp, Artificial Sequence
  Probe
tacaatctccagcat

SEQ ID NO: 54861 - DNA, 24 bp, Artificial Sequence
  Probe
tacaatctccagcattccccctca

SEQ ID NO: 54862 - DNA, 29 bp, Artificial Sequence
  Probe
tacaatctccagcattccccctcaaacct

SEQ ID NO: 54863 - DNA, 30 bp, Artificial Sequence; identical to SEQ ID NO: 7478
  Probe

SEQ ID NO: 54864 - DNA, 50 bp, Artificial Sequence; identical to SEQ ID NO: 7482
  Probe

SEQ ID NO: 54865 - DNA, 32 bp, Artificial Sequence; identical to SEQ ID NO: 7488
  Probe

SEQ ID NO: 54866 - DNA, 39 bp, Artificial Sequence; identical to SEQ ID NO: 7495
  Probe

SEQ ID NO: 54867 - DNA, 40 bp, Artificial Sequence; identical to SEQ ID NO: 7496
  Probe

SEQ ID NO: 54868 - DNA, 41 bp, Artificial Sequence; identical to SEQ ID NO: 7497
  Probe

SEQ ID NO: 54869 - DNA, 42 bp, Artificial Sequence; identical to SEQ ID NO: 7498
  Probe

SEQ ID NO: 54870 - DNA, 26 bp, Artificial Sequence
  Probe
tacagtcagaggttcaattcctcttc

SEQ ID NO: 54871 - DNA, 27 bp, Artificial Sequence
  Probe
tacagtcagaggttcaattcctcttct

SEQ ID NO: 54872 - DNA, 28 bp, Artificial Sequence
  Probe
tacagtcagaggttcaattcctcttctt

SEQ ID NO: 54873 - DNA, 29 bp, Artificial Sequence
  Probe
tacagtcagaggttcaattcctcttctta

SEQ ID NO: 54874 - DNA, 32 bp, Artificial Sequence; identical to SEQ ID NO: 7506
  Probe

SEQ ID NO: 54875 - DNA, 35 bp, Artificial Sequence
  Probe
tacagtcagaggttcaattcctcttcttaacaaca

SEQ ID NO: 54876 - DNA, 28 bp, Artificial Sequence
  Probe
tacccacacccacccaagaacagggttt

SEQ ID NO: 54877 - DNA, 29 bp, Artificial Sequence
  Probe
tacccacacccacccaagaacagggtttg

SEQ ID NO: 54878 - DNA, 30 bp, Artificial Sequence; identical to SEQ ID NO: 7510
  Probe

SEQ ID NO: 54879 - DNA, 31 bp, Artificial Sequence; identical to SEQ ID NO: 7511
  Probe

SEQ ID NO: 54880 - DNA, 32 bp, Artificial Sequence; identical to SEQ ID NO: 7512
  Probe

SEQ ID NO: 54881 - DNA, 33 bp, Artificial Sequence; identical to SEQ ID NO: 23384
  Probe

SEQ ID NO: 54882 - DNA, 31 bp, Artificial Sequence; identical to SEQ ID NO: 7516
  Probe

SEQ ID NO: 54883 - DNA, 33 bp, Artificial Sequence; identical to SEQ ID NO: 7518
  Probe

SEQ ID NO: 54884 - DNA, 35 bp, Artificial Sequence; identical to SEQ ID NO: 1576
  Probe

SEQ ID NO: 54885 - DNA, 36 bp, Artificial Sequence; identical to SEQ ID NO: 1577
  Probe

SEQ ID NO: 54886 - DNA, 39 bp, Artificial Sequence; identical to SEQ ID NO: 7520
  Probe

SEQ ID NO: 54887 - DNA, 50 bp, Artificial Sequence; identical to SEQ ID NO: 7523
  Probe

SEQ ID NO: 54888 - DNA, 16 bp, Artificial Sequence
  Probe
tacctcctcaaagcaa

SEQ ID NO: 54889 - DNA, 17 bp, Artificial Sequence
  Probe
tacctcctcaaagcaat

SEQ ID NO: 54890 - DNA, 19 bp, Artificial Sequence
  Probe
tacctcctcaaagcaatac

SEQ ID NO: 54891 - DNA, 20 bp, Artificial Sequence
  Probe
tacctcctcaaagcaataca

SEQ ID NO: 54892 - DNA, 23 bp, Artificial Sequence
  Probe
tacctcctcaaagcaatacactg

SEQ ID NO: 54893 - DNA, 24 bp, Artificial Sequence
  Probe
tacctcctcaaagcaatacactga

SEQ ID NO: 54894 - DNA, 45 bp, Artificial Sequence; identical to SEQ ID NO: 7533
  Probe

SEQ ID NO: 54895 - DNA, 46 bp, Artificial Sequence
  Probe
tacctcctcaaagcaatacactgaaaatgtttagacgggctcacat

SEQ ID NO: 54896 - DNA, 50 bp, Artificial Sequence; identical to SEQ ID NO: 1579
  Probe

SEQ ID NO: 54897 - DNA, 22 bp, Artificial Sequence
  Probe
tactctgcgttgtggccgcagc

SEQ ID NO: 54898 - DNA, 23 bp, Artificial Sequence
  Probe
tactctgcgttgtggccgcagca

SEQ ID NO: 54899 - DNA, 48 bp, Artificial Sequence
  Probe
tactttgatagagtaaataataggagcttaaacccccttatttctagg

SEQ ID NO: 54900 - DNA, 50 bp, Artificial Sequence; identical to SEQ ID NO: 7535
  Probe

SEQ ID NO: 54901 - DNA, 21 bp, Artificial Sequence
  Probe
tagaattctcgcctgccacgc

SEQ ID NO: 54902 - DNA, 24 bp, Artificial Sequence
  Probe
tagacgggctcacatcaccccata

SEQ ID NO: 54903 - DNA, 31 bp, Artificial Sequence; identical to SEQ ID NO: 7543
  Probe

SEQ ID NO: 54904 - DNA, 23 bp, Artificial Sequence
  Probe
tagagcatgagactcttaatctc

SEQ ID NO: 54905 - DNA, 23 bp, Artificial Sequence
  Probe
tagagcatgggactcttaatccc

SEQ ID NO: 54906 - DNA, 40 bp, Artificial Sequence; identical to SEQ ID NO: 7551
  Probe

SEQ ID NO: 54907 - DNA, 41 bp, Artificial Sequence; identical to SEQ ID NO: 7552
  Probe

SEQ ID NO: 54908 - DNA, 50 bp, Artificial Sequence; identical to SEQ ID NO: 1582
  Probe

SEQ ID NO: 54909 - DNA, 31 bp, Artificial Sequence; identical to SEQ ID NO: 23447
  Probe

SEQ ID NO: 54910 - DNA, 49 bp, Artificial Sequence; identical to SEQ ID NO: 1585
  Probe

SEQ ID NO: 54911 - DNA, 22 bp, Artificial Sequence
  Probe
tagccccaaacccactccacct

SEQ ID NO: 54912 - DNA, 27 bp, Artificial Sequence
  Probe
tagcggttaggattcctggttttcacc

SEQ ID NO: 54913 - DNA, 36 bp, Artificial Sequence
  Probe
tagcggttaggattcctggttttcacccaggcggcc

SEQ ID NO: 54914 - DNA, 38 bp, Artificial Sequence; identical to SEQ ID NO: 23458
  Probe

SEQ ID NO: 54915 - DNA, 37 bp, Artificial Sequence
  Probe
tagcggttaggattcctggttttcacccaggtggccc

SEQ ID NO: 54916 - DNA, 24 bp, Artificial Sequence
  Probe
tagctcagtcggtagagcatcaga

SEQ ID NO: 54917 - DNA, 22 bp, Artificial Sequence
  Probe
tagctcagtcggtagagcatga

SEQ ID NO: 54918 - DNA, 24 bp, Artificial Sequence
  Probe
tagctcagtcggtagagcatgaga

SEQ ID NO: 54919 - DNA, 27 bp, Artificial Sequence
  Probe
tagctcagtcggtagagcatgagactc

SEQ ID NO: 54920 - DNA, 25 bp, Artificial Sequence
  Probe
tagctcagtcggtagagcatgggac

SEQ ID NO: 54921 - DNA, 26 bp, Artificial Sequence
  Probe
tagctcagtcggtagagcatgggact

SEQ ID NO: 54922 - DNA, 27 bp, Artificial Sequence
  Probe
tagctcagtcggtagagcatgggactc

SEQ ID NO: 54923 - DNA, 35 bp, Artificial Sequence; identical to SEQ ID NO: 7579
  Probe

SEQ ID NO: 54924 - DNA, 21 bp, Artificial Sequence
  Probe
taggatggggtgtgataggtg

SEQ ID NO: 54925 - DNA, 30 bp, Artificial Sequence; identical to SEQ ID NO: 1592
  Probe

SEQ ID NO: 54926 - DNA, 34 bp, Artificial Sequence; identical to SEQ ID NO: 7586
  Probe

SEQ ID NO: 54927 - DNA, 35 bp, Artificial Sequence; identical to SEQ ID NO: 7587
  Probe

SEQ ID NO: 54928 - DNA, 36 bp, Artificial Sequence; identical to SEQ ID NO: 1595
  Probe

SEQ ID NO: 54929 - DNA, 37 bp, Artificial Sequence; identical to SEQ ID NO: 7588
  Probe

SEQ ID NO: 54930 - DNA, 38 bp, Artificial Sequence; identical to SEQ ID NO: 23494
  Probe

SEQ ID NO: 54931 - DNA, 39 bp, Artificial Sequence; identical to SEQ ID NO: 34062
  Probe

SEQ ID NO: 54932 - DNA, 49 bp, Artificial Sequence; identical to SEQ ID NO: 23495
  Probe

SEQ ID NO: 54933 - DNA, 26 bp, Artificial Sequence
  Probe
taggctaaatcctatatatcttaatg

SEQ ID NO: 54934 - DNA, 18 bp, Artificial Sequence
  Probe
taggggtatgattctcgc

SEQ ID NO: 54935 - DNA, 19 bp, Artificial Sequence
  Probe
taggggtatgattctcgct

SEQ ID NO: 54936 - DNA, 37 bp, Artificial Sequence
  Probe
taggggtatgattctcgcttagggtgcgagaggtccc

SEQ ID NO: 54937 - DNA, 37 bp, Artificial Sequence
  Probe
taggggtatgattctcgcttcgggtgcgagaggtccc

SEQ ID NO: 54938 - DNA, 37 bp, Artificial Sequence; identical to SEQ ID NO: 23503
  Probe

SEQ ID NO: 54939 - DNA, 18 bp, Artificial Sequence
  Probe
tagggtgcgagaggtccc

SEQ ID NO: 54940 - DNA, 22 bp, Artificial Sequence
  Probe
tagggtgcgagaggtcccgggt

SEQ ID NO: 54941 - DNA, 23 bp, Artificial Sequence
  Probe
tagggtgcgagaggtcccgggtt

SEQ ID NO: 54942 - DNA, 22 bp, Artificial Sequence
  Probe
tagtaaacaggagatcctgggt

SEQ ID NO: 54943 - DNA, 23 bp, Artificial Sequence
  Probe
tagtaaacaggagatcctgggtt

SEQ ID NO: 54944 - DNA, 20 bp, Artificial Sequence
  Probe
tagtccgtgcgagaataatg

SEQ ID NO: 54945 - DNA, 37 bp, Artificial Sequence; identical to SEQ ID NO: 14202
  Probe

SEQ ID NO: 54946 - DNA, 16 bp, Artificial Sequence
  Probe
tagtggtatcatgcaa

SEQ ID NO: 54947 - DNA, 18 bp, Artificial Sequence
  Probe
tagtggtatcatgcaaga

SEQ ID NO: 54948 - DNA, 27 bp, Artificial Sequence
  Probe
tagtggtatcatgcaagattcccattc

SEQ ID NO: 54949 - DNA, 36 bp, Artificial Sequence
  Probe
tagtggtatcatgcaagattcccattcttgcgaccc

SEQ ID NO: 54950 - DNA, 37 bp, Artificial Sequence
  Probe
tagtggtatcatgcaagattcccattcttgcgacccg

SEQ ID NO: 54951 - DNA, 38 bp, Artificial Sequence
  Probe
tagtggtatcatgcaagattcccattcttgcgacccgg

SEQ ID NO: 54952 - DNA, 18 bp, Artificial Sequence
  Probe
tagtggtatgattctcgc

SEQ ID NO: 54953 - DNA, 19 bp, Artificial Sequence
  Probe
tagtggtatgattctcgct

SEQ ID NO: 54954 - DNA, 37 bp, Artificial Sequence; identical to SEQ ID NO: 14204
  Probe

SEQ ID NO: 54955 - DNA, 38 bp, Artificial Sequence
  Probe
tagtggtatgattctcgctttgggtgcgagaggtcccg

SEQ ID NO: 54956 - DNA, 16 bp, Artificial Sequence
  Probe
tagtggtgagtatccc

SEQ ID NO: 54957 - DNA, 17 bp, Artificial Sequence
  Probe
tagtggtgagtatcccc

SEQ ID NO: 54958 - DNA, 18 bp, Artificial Sequence
  Probe
tagtggtgagtatccccg

SEQ ID NO: 54959 - DNA, 19 bp, Artificial Sequence
  Probe
tagtggtgagtatccccgc

SEQ ID NO: 54960 - DNA, 20 bp, Artificial Sequence
  Probe
tagtggtgagtatccccgcc

SEQ ID NO: 54961 - DNA, 23 bp, Artificial Sequence
  Probe
tagtggtgagtatccccgcctgt

SEQ ID NO: 54962 - DNA, 25 bp, Artificial Sequence
  Probe
tagtggtgagtatccccgcctgtca

SEQ ID NO: 54963 - DNA, 26 bp, Artificial Sequence
  Probe
tagtggtgagtatccccgcctgtcac

SEQ ID NO: 54964 - DNA, 27 bp, Artificial Sequence
  Probe
tagtggtgagtatccccgcctgtcacg

SEQ ID NO: 54965 - DNA, 28 bp, Artificial Sequence
  Probe
tagtggtgagtatccccgcctgtcacgc

SEQ ID NO: 54966 - DNA, 36 bp, Artificial Sequence; identical to SEQ ID NO: 14212
  Probe

SEQ ID NO: 54967 - DNA, 37 bp, Artificial Sequence; identical to SEQ ID NO: 23534
  Probe

SEQ ID NO: 54968 - DNA, 38 bp, Artificial Sequence; identical to SEQ ID NO: 14213
  Probe

SEQ ID NO: 54969 - DNA, 37 bp, Artificial Sequence; identical to SEQ ID NO: 23538
  Probe

SEQ ID NO: 54970 - DNA, 16 bp, Artificial Sequence
  Probe
tagtggttaggattcg

SEQ ID NO: 54971 - DNA, 17 bp, Artificial Sequence
  Probe
tagtggttaggattcgg

SEQ ID NO: 54972 - DNA, 18 bp, Artificial Sequence
  Probe
tagtggttaggattcggc

SEQ ID NO: 54973 - DNA, 22 bp, Artificial Sequence
  Probe
tagtggttaggattcggcgctc

SEQ ID NO: 54974 - DNA, 23 bp, Artificial Sequence
  Probe
tagtggttaggattcggcgctct

SEQ ID NO: 54975 - DNA, 24 bp, Artificial Sequence
  Probe
tagtggttaggattcggcgctctc

SEQ ID NO: 54976 - DNA, 27 bp, Artificial Sequence
  Probe
tagtggttaggattcggcgctctcacc

SEQ ID NO: 54977 - DNA, 29 bp, Artificial Sequence
  Probe
tagtggttaggattcggcgctctcaccgc

SEQ ID NO: 54978 - DNA, 33 bp, Artificial Sequence; identical to SEQ ID NO: 23549
  Probe

SEQ ID NO: 54979 - DNA, 41 bp, Artificial Sequence
  Probe
tagtggttaggattcggcgctctcaccgccgcggcccgggt

SEQ ID NO: 54980 - DNA, 17 bp, Artificial Sequence
  Probe
tagtggttagtactctg

SEQ ID NO: 54981 - DNA, 18 bp, Artificial Sequence
  Probe
tagtggttagtactctgc

SEQ ID NO: 54982 - DNA, 20 bp, Artificial Sequence
  Probe
tagtggttagtactctgcgt

SEQ ID NO: 54983 - DNA, 21 bp, Artificial Sequence
  Probe
tagtggttagtactctgcgtt

SEQ ID NO: 54984 - DNA, 33 bp, Artificial Sequence; identical to SEQ ID NO: 23556
  Probe

SEQ ID NO: 54985 - DNA, 16 bp, Artificial Sequence
  Probe
tagtggttagtatccc

SEQ ID NO: 54986 - DNA, 24 bp, Artificial Sequence
  Probe
tagtggttagtatccccgcctgtc

SEQ ID NO: 54987 - DNA, 26 bp, Artificial Sequence
  Probe
tagtggttagtatccccgcctgtcac

SEQ ID NO: 54988 - DNA, 38 bp, Artificial Sequence; identical to SEQ ID NO: 23562
  Probe

SEQ ID NO: 54989 - DNA, 16 bp, Artificial Sequence
  Probe
tagtggttatcacgtt

SEQ ID NO: 54990 - DNA, 42 bp, Artificial Sequence; identical to SEQ ID NO: 23563
  Probe

SEQ ID NO: 54991 - DNA, 42 bp, Artificial Sequence; identical to SEQ ID NO: 23565
  Probe

SEQ ID NO: 54992 - DNA, 24 bp, Artificial Sequence
  Probe
tagtgtagtggttatcacgttcgc

SEQ ID NO: 54993 - DNA, 25 bp, Artificial Sequence
  Probe
tagtgtagtggttatcacgttcgcc

SEQ ID NO: 54994 - DNA, 15 bp, Artificial Sequence
  Probe
tatacccacacccac

SEQ ID NO: 54995 - DNA, 18 bp, Artificial Sequence
  Probe
tatacccacacccaccca

SEQ ID NO: 54996 - DNA, 19 bp, Artificial Sequence
  Probe
tatacccacacccacccaa

SEQ ID NO: 54997 - DNA, 20 bp, Artificial Sequence
  Probe
tatacccacacccacccaag

SEQ ID NO: 54998 - DNA, 21 bp, Artificial Sequence
  Probe
tatacccacacccacccaaga

SEQ ID NO: 54999 - DNA, 24 bp, Artificial Sequence
  Probe
tatacccacacccacccaagaaca

SEQ ID NO: 55000 - DNA, 26 bp, Artificial Sequence
  Probe
tatacccacacccacccaagaacagg

SEQ ID NO: 55001 - DNA, 27 bp, Artificial Sequence
  Probe
tatacccacacccacccaagaacaggg

SEQ ID NO: 55002 - DNA, 28 bp, Artificial Sequence
  Probe
tatacccacacccacccaagaacagggt

SEQ ID NO: 55003 - DNA, 29 bp, Artificial Sequence
  Probe
tatacccacacccacccaagaacagggtt

SEQ ID NO: 55004 - DNA, 30 bp, Artificial Sequence; identical to SEQ ID NO: 7623
  Probe

SEQ ID NO: 55005 - DNA, 31 bp, Artificial Sequence; identical to SEQ ID NO: 7624
  Probe

SEQ ID NO: 55006 - DNA, 32 bp, Artificial Sequence; identical to SEQ ID NO: 7625
  Probe

SEQ ID NO: 55007 - DNA, 33 bp, Artificial Sequence; identical to SEQ ID NO: 7626
  Probe

SEQ ID NO: 55008 - DNA, 34 bp, Artificial Sequence; identical to SEQ ID NO: 7627
  Probe

SEQ ID NO: 55009 - DNA, 35 bp, Artificial Sequence; identical to SEQ ID NO: 7628
  Probe

SEQ ID NO: 55010 - DNA, 36 bp, Artificial Sequence; identical to SEQ ID NO: 7629
  Probe

SEQ ID NO: 55011 - DNA, 37 bp, Artificial Sequence; identical to SEQ ID NO: 7630
  Probe

SEQ ID NO: 55012 - DNA, 38 bp, Artificial Sequence; identical to SEQ ID NO: 23596
  Probe

SEQ ID NO: 55013 - DNA, 39 bp, Artificial Sequence; identical to SEQ ID NO: 7631
  Probe

SEQ ID NO: 55014 - DNA, 40 bp, Artificial Sequence; identical to SEQ ID NO: 7632
  Probe

SEQ ID NO: 55015 - DNA, 38 bp, Artificial Sequence; identical to SEQ ID NO: 7637
  Probe

SEQ ID NO: 55016 - DNA, 50 bp, Artificial Sequence
  Probe
tatccattggtcttaggccccaaaaattttggtgcaactccaaataaaag

SEQ ID NO: 55017 - DNA, 49 bp, Artificial Sequence
  Probe
tatccccgcctgtcacgcgggagaccggggttcgattccccgacgggga

SEQ ID NO: 55018 - DNA, 24 bp, Artificial Sequence
  Probe
tatgataatcatatttaccaaatg

SEQ ID NO: 55019 - DNA, 16 bp, Artificial Sequence
  Probe
tcaaaggttccgggtt

SEQ ID NO: 55020 - DNA, 32 bp, Artificial Sequence; identical to SEQ ID NO: 7643
  Probe

SEQ ID NO: 55021 - DNA, 22 bp, Artificial Sequence
  Probe
tcaaatcccggacgagccccct

SEQ ID NO: 55022 - DNA, 23 bp, Artificial Sequence
  Probe
tcaaatcccggacgagccccctt

SEQ ID NO: 55023 - DNA, 24 bp, Artificial Sequence
  Probe
tcaaatcccggacgagcccccttt

SEQ ID NO: 55024 - DNA, 25 bp, Artificial Sequence
  Probe
tcaaatcccggacgagccccctttt

SEQ ID NO: 55025 - DNA, 22 bp, Artificial Sequence
  Probe
tcaaatcccggacgagcccggt

SEQ ID NO: 55026 - DNA, 23 bp, Artificial Sequence
  Probe
tcaaatcccggacgagcccggtt

SEQ ID NO: 55027 - DNA, 23 bp, Artificial Sequence
  Probe
tcaaatcccggacgagccctcat

SEQ ID NO: 55028 - DNA, 24 bp, Artificial Sequence
  Probe
tcaaatcccggacgagccctcatt

SEQ ID NO: 55029 - DNA, 25 bp, Artificial Sequence
  Probe
tcaaatcccggacgagccctcattt

SEQ ID NO: 55030 - DNA, 22 bp, Artificial Sequence
  Probe
tcaaatccgggtgccccctcaa

SEQ ID NO: 55031 - DNA, 23 bp, Artificial Sequence
  Probe
tcaaatccgggtgccccctcaat

SEQ ID NO: 55032 - DNA, 22 bp, Artificial Sequence
  Probe
tcaaatccgggtgccccctcac

SEQ ID NO: 55033 - DNA, 22 bp, Artificial Sequence
  Probe
tcaaatccgggtgccccctctg

SEQ ID NO: 55034 - DNA, 24 bp, Artificial Sequence
  Probe
tcaacttaacttgaccgctctgag

SEQ ID NO: 55035 - DNA, 25 bp, Artificial Sequence
  Probe
tcaacttaacttgaccgctctgagc

SEQ ID NO: 55036 - DNA, 26 bp, Artificial Sequence
  Probe
tcaacttaacttgaccgctctgagct

SEQ ID NO: 55037 - DNA, 16 bp, Artificial Sequence
  Probe
tcaagaggtccccggt

SEQ ID NO: 55038 - DNA, 38 bp, Artificial Sequence; identical to SEQ ID NO: 23641
  Probe

SEQ ID NO: 55039 - DNA, 22 bp, Artificial Sequence
  Probe
tcaagtccctgttcgggcggca

SEQ ID NO: 55040 - DNA, 22 bp, Artificial Sequence
  Probe
tcaatcccgggtttcggcagcg

SEQ ID NO: 55041 - DNA, 22 bp, Artificial Sequence
  Probe
tcacaagaactgctaactcatg

SEQ ID NO: 55042 - DNA, 45 bp, Artificial Sequence; identical to SEQ ID NO: 1607
  Probe

SEQ ID NO: 55043 - DNA, 46 bp, Artificial Sequence; identical to SEQ ID NO: 1608
  Probe

SEQ ID NO: 55044 - DNA, 17 bp, Artificial Sequence
  Probe
tcacacgcgaaaggtcc

SEQ ID NO: 55045 - DNA, 19 bp, Artificial Sequence
  Probe
tcacacgcgaaaggtcccc

SEQ ID NO: 55046 - DNA, 21 bp, Artificial Sequence
  Probe
tcacacgcgaaaggtccccgg

SEQ ID NO: 55047 - DNA, 23 bp, Artificial Sequence
  Probe
tcacacgcgaaaggtccccggtt

SEQ ID NO: 55048 - DNA, 24 bp, Artificial Sequence
  Probe
tcacacgcgaaaggtccccggttc

SEQ ID NO: 55049 - DNA, 25 bp, Artificial Sequence
  Probe
tcacacgcgaaaggtccccggttcg

SEQ ID NO: 55050 - DNA, 37 bp, Artificial Sequence
  Probe
tcacacgcgaaaggtccccggttcgaaaccgggcgga

SEQ ID NO: 55051 - DNA, 38 bp, Artificial Sequence; identical to SEQ ID NO: 41688
  Probe

SEQ ID NO: 55052 - DNA, 24 bp, Artificial Sequence
  Probe
tcacacgcgaaaggtccccggttt

SEQ ID NO: 55053 - DNA, 25 bp, Artificial Sequence
  Probe
tcacacgcgaaaggtccccggtttg

SEQ ID NO: 55054 - DNA, 22 bp, Artificial Sequence
  Probe
tcacatcaccccataaacaaat

SEQ ID NO: 55055 - DNA, 41 bp, Artificial Sequence; identical to SEQ ID NO: 7677
  Probe

SEQ ID NO: 55056 - DNA, 20 bp, Artificial Sequence
  Probe
tcaccgccgcggcccgggtt

SEQ ID NO: 55057 - DNA, 21 bp, Artificial Sequence
  Probe
tcaccgccgcggcccgggttc

SEQ ID NO: 55058 - DNA, 20 bp, Artificial Sequence
  Probe
tcacctggagcatgttttct

SEQ ID NO: 55059 - DNA, 21 bp, Artificial Sequence
  Probe
tcacctggagcatgttttctt

SEQ ID NO: 55060 - DNA, 22 bp, Artificial Sequence
  Probe
tcacctggagcatgttttcttc

SEQ ID NO: 55061 - DNA, 23 bp, Artificial Sequence
  Probe
tcacctggagcatgttttcttcc

SEQ ID NO: 55062 - DNA, 19 bp, Artificial Sequence
  Probe
tcacgcgggagaccggggt

SEQ ID NO: 55063 - DNA, 20 bp, Artificial Sequence
  Probe
tcacgcgggagaccggggtt

SEQ ID NO: 55064 - DNA, 21 bp, Artificial Sequence
  Probe
tcacgcgggagaccggggttc

SEQ ID NO: 55065 - DNA, 23 bp, Artificial Sequence
  Probe
tcacgcgggagaccggggttcaa

SEQ ID NO: 55066 - DNA, 41 bp, Artificial Sequence; identical to SEQ ID NO: 7691
  Probe

SEQ ID NO: 55067 - DNA, 32 bp, Artificial Sequence; identical to SEQ ID NO: 1618
  Probe

SEQ ID NO: 55068 - DNA, 33 bp, Artificial Sequence; identical to SEQ ID NO: 1619
  Probe

SEQ ID NO: 55069 - DNA, 34 bp, Artificial Sequence; identical to SEQ ID NO: 1620
  Probe

SEQ ID NO: 55070 - DNA, 38 bp, Artificial Sequence; identical to SEQ ID NO: 1623
  Probe

SEQ ID NO: 55071 - DNA, 39 bp, Artificial Sequence; identical to SEQ ID NO: 7699
  Probe

SEQ ID NO: 55072 - DNA, 39 bp, Artificial Sequence; identical to SEQ ID NO: 7711
  Probe

SEQ ID NO: 55073 - DNA, 41 bp, Artificial Sequence; identical to SEQ ID NO: 7716
  Probe

SEQ ID NO: 55074 - DNA, 49 bp, Artificial Sequence; identical to SEQ ID NO: 7719
  Probe

SEQ ID NO: 55075 - DNA, 50 bp, Artificial Sequence; identical to SEQ ID NO: 7720
  Probe

SEQ ID NO: 55076 - DNA, 41 bp, Artificial Sequence; identical to SEQ ID NO: 7723
  Probe

SEQ ID NO: 55077 - DNA, 42 bp, Artificial Sequence; identical to SEQ ID NO: 7724
  Probe

SEQ ID NO: 55078 - DNA, 43 bp, Artificial Sequence; identical to SEQ ID NO: 7725
  Probe

SEQ ID NO: 55079 - DNA, 19 bp, Artificial Sequence
  Probe
tcacgtctgctttacacgc

SEQ ID NO: 55080 - DNA, 38 bp, Artificial Sequence; identical to SEQ ID NO: 7729
  Probe

SEQ ID NO: 55081 - DNA, 50 bp, Artificial Sequence; identical to SEQ ID NO: 7731
  Probe

SEQ ID NO: 55082 - DNA, 28 bp, Artificial Sequence
  Probe
tcagcctccggagctggggattgtgggt

SEQ ID NO: 55083 - DNA, 27 bp, Artificial Sequence
  Probe
tcagctaaataagctatcgggcccata

SEQ ID NO: 55084 - DNA, 28 bp, Artificial Sequence
  Probe
tcagctaaataagctatcgggcccatac

SEQ ID NO: 55085 - DNA, 37 bp, Artificial Sequence; identical to SEQ ID NO: 7737
  Probe

SEQ ID NO: 55086 - DNA, 38 bp, Artificial Sequence; identical to SEQ ID NO: 23716
  Probe

SEQ ID NO: 55087 - DNA, 39 bp, Artificial Sequence; identical to SEQ ID NO: 7738
  Probe

SEQ ID NO: 55088 - DNA, 18 bp, Artificial Sequence
  Probe
tcagtcggtagagcatca

SEQ ID NO: 55089 - DNA, 37 bp, Artificial Sequence; identical to SEQ ID NO: 7747
  Probe

SEQ ID NO: 55090 - DNA, 22 bp, Artificial Sequence
  Probe
tcataatctgaaggtcgtgagt

SEQ ID NO: 55091 - DNA, 38 bp, Artificial Sequence; identical to SEQ ID NO: 14239
  Probe

SEQ ID NO: 55092 - DNA, 41 bp, Artificial Sequence; identical to SEQ ID NO: 7751
  Probe

SEQ ID NO: 55093 - DNA, 15 bp, Artificial Sequence
  Probe
tcatattgaattgca

SEQ ID NO: 55094 - DNA, 50 bp, Artificial Sequence; identical to SEQ ID NO: 7753
  Probe

SEQ ID NO: 55095 - DNA, 19 bp, Artificial Sequence
  Probe
tcatgcaagattcccattc

SEQ ID NO: 55096 - DNA, 33 bp, Artificial Sequence; identical to SEQ ID NO: 23734
  Probe

SEQ ID NO: 55097 - DNA, 17 bp, Artificial Sequence
  Probe
tcatgcccccatgtcta

SEQ ID NO: 55098 - DNA, 20 bp, Artificial Sequence
  Probe
tcatgcccccatgtctaaca

SEQ ID NO: 55099 - DNA, 21 bp, Artificial Sequence
  Probe
tcatgcccccatgtctaacaa

SEQ ID NO: 55100 - DNA, 24 bp, Artificial Sequence
  Probe
tcatgcccccatgtctaacaacat

SEQ ID NO: 55101 - DNA, 25 bp, Artificial Sequence
  Probe
tcatgcccccatgtctaacaacatg

SEQ ID NO: 55102 - DNA, 26 bp, Artificial Sequence
  Probe
tcatgcccccatgtctaacaacatgg

SEQ ID NO: 55103 - DNA, 28 bp, Artificial Sequence
  Probe
tcatgcccccatgtctaacaacatggct

SEQ ID NO: 55104 - DNA, 29 bp, Artificial Sequence
  Probe
tcatgcccccatgtctaacaacatggctt

SEQ ID NO: 55105 - DNA, 30 bp, Artificial Sequence; identical to SEQ ID NO: 7761
  Probe

SEQ ID NO: 55106 - DNA, 31 bp, Artificial Sequence; identical to SEQ ID NO: 7762
  Probe

SEQ ID NO: 55107 - DNA, 32 bp, Artificial Sequence; identical to SEQ ID NO: 7763
  Probe

SEQ ID NO: 55108 - DNA, 33 bp, Artificial Sequence; identical to SEQ ID NO: 7764
  Probe

SEQ ID NO: 55109 - DNA, 34 bp, Artificial Sequence; identical to SEQ ID NO: 7765
  Probe

SEQ ID NO: 55110 - DNA, 35 bp, Artificial Sequence; identical to SEQ ID NO: 7766
  Probe

SEQ ID NO: 55111 - DNA, 36 bp, Artificial Sequence; identical to SEQ ID NO: 7767
  Probe

SEQ ID NO: 55112 - DNA, 37 bp, Artificial Sequence; identical to SEQ ID NO: 7768
  Probe

SEQ ID NO: 55113 - DNA, 38 bp, Artificial Sequence; identical to SEQ ID NO: 23749
  Probe

SEQ ID NO: 55114 - DNA, 39 bp, Artificial Sequence; identical to SEQ ID NO: 23750
  Probe

SEQ ID NO: 55115 - DNA, 40 bp, Artificial Sequence
  Probe
tcatgcccccatgtctaacaacatggctttctcaactttt

SEQ ID NO: 55116 - DNA, 33 bp, Artificial Sequence; identical to SEQ ID NO: 7769
  Probe

SEQ ID NO: 55117 - DNA, 36 bp, Artificial Sequence; identical to SEQ ID NO: 34374
  Probe

SEQ ID NO: 55118 - DNA, 39 bp, Artificial Sequence; identical to SEQ ID NO: 7775
  Probe

SEQ ID NO: 55119 - DNA, 41 bp, Artificial Sequence; identical to SEQ ID NO: 7777
  Probe

SEQ ID NO: 55120 - DNA, 17 bp, Artificial Sequence
  Probe
tccagcgatccgagttc

SEQ ID NO: 55121 - DNA, 25 bp, Artificial Sequence
  Probe
tccattggggtttccccgcgcaggt

SEQ ID NO: 55122 - DNA, 44 bp, Artificial Sequence; identical to SEQ ID NO: 23813
  Probe

SEQ ID NO: 55123 - DNA, 48 bp, Artificial Sequence
  Probe
tccattggtcttaggccccaaaaattttggtgcaactccaaataaaag

SEQ ID NO: 55124 - DNA, 20 bp, Artificial Sequence
  Probe
tcccacatggtctagcggtt

SEQ ID NO: 55125 - DNA, 21 bp, Artificial Sequence
  Probe
tcccacatggtctagcggtta

SEQ ID NO: 55126 - DNA, 32 bp, Artificial Sequence; identical to SEQ ID NO: 1645
  Probe

SEQ ID NO: 55127 - DNA, 36 bp, Artificial Sequence; identical to SEQ ID NO: 1649
  Probe

SEQ ID NO: 55128 - DNA, 39 bp, Artificial Sequence; identical to SEQ ID NO: 7795
  Probe

SEQ ID NO: 55129 - DNA, 42 bp, Artificial Sequence; identical to SEQ ID NO: 23823
  Probe

SEQ ID NO: 55130 - DNA, 44 bp, Artificial Sequence; identical to SEQ ID NO: 23824
  Probe

SEQ ID NO: 55131 - DNA, 45 bp, Artificial Sequence; identical to SEQ ID NO: 41781
  Probe

SEQ ID NO: 55132 - DNA, 49 bp, Artificial Sequence; identical to SEQ ID NO: 7797
  Probe

SEQ ID NO: 55133 - DNA, 50 bp, Artificial Sequence; identical to SEQ ID NO: 7798
  Probe

SEQ ID NO: 55134 - DNA, 20 bp, Artificial Sequence
  Probe
tcccaccgctgccacacctc

SEQ ID NO: 55135 - DNA, 20 bp, Artificial Sequence
  Probe
tcccaccgctgccaggttta

SEQ ID NO: 55136 - DNA, 23 bp, Artificial Sequence
  Probe
tcccatatggtctagcggttagg

SEQ ID NO: 55137 - DNA, 24 bp, Artificial Sequence
  Probe
tcccatatggtctagcggttagga

SEQ ID NO: 55138 - DNA, 30 bp, Artificial Sequence; identical to SEQ ID NO: 1659
  Probe

SEQ ID NO: 55139 - DNA, 31 bp, Artificial Sequence; identical to SEQ ID NO: 1660
  Probe

SEQ ID NO: 55140 - DNA, 32 bp, Artificial Sequence; identical to SEQ ID NO: 1661
  Probe

SEQ ID NO: 55141 - DNA, 34 bp, Artificial Sequence; identical to SEQ ID NO: 1663
  Probe

SEQ ID NO: 55142 - DNA, 35 bp, Artificial Sequence; identical to SEQ ID NO: 1664
  Probe

SEQ ID NO: 55143 - DNA, 39 bp, Artificial Sequence; identical to SEQ ID NO: 7803
  Probe

SEQ ID NO: 55144 - DNA, 40 bp, Artificial Sequence; identical to SEQ ID NO: 7804
  Probe

SEQ ID NO: 55145 - DNA, 41 bp, Artificial Sequence; identical to SEQ ID NO: 14294
  Probe

SEQ ID NO: 55146 - DNA, 50 bp, Artificial Sequence; identical to SEQ ID NO: 7805
  Probe

SEQ ID NO: 55147 - DNA, 38 bp, Artificial Sequence
  Probe
tcccattcttgcgacccgggttcgattcccgggcggcg

SEQ ID NO: 55148 - DNA, 39 bp, Artificial Sequence
  Probe
tcccattcttgcgacccgggttcgattcccgggcggcgc

SEQ ID NO: 55149 - DNA, 40 bp, Artificial Sequence
  Probe
tcccattcttgcgacccgggttcgattcccgggcggcgca

SEQ ID NO: 55150 - DNA, 42 bp, Artificial Sequence
  Probe
tcccattcttgcgacccgggttcgattcccgggcggcgcact

SEQ ID NO: 55151 - DNA, 43 bp, Artificial Sequence; identical to SEQ ID NO: 7806
  Probe

SEQ ID NO: 55152 - DNA, 50 bp, Artificial Sequence
  Probe
tcccattcttgcgacccgggttcgattcccgggcggcgcacttagttttt

SEQ ID NO: 55153 - DNA, 20 bp, Artificial Sequence
  Probe
tccccggcacctccaaacgg

SEQ ID NO: 55154 - DNA, 21 bp, Artificial Sequence
  Probe
tccccggcacctccaaacggt

SEQ ID NO: 55155 - DNA, 22 bp, Artificial Sequence
  Probe
tccccggcacctccaaacggtg

SEQ ID NO: 55156 - DNA, 19 bp, Artificial Sequence
  Probe
tccccggcacctccaccag

SEQ ID NO: 55157 - DNA, 20 bp, Artificial Sequence
  Probe
tccccggcacctccaccagt

SEQ ID NO: 55158 - DNA, 21 bp, Artificial Sequence
  Probe
tccccggcacctccaccagtt

SEQ ID NO: 55159 - DNA, 22 bp, Artificial Sequence
  Probe
tccccggcacctccaccagttt

SEQ ID NO: 55160 - DNA, 23 bp, Artificial Sequence
  Probe
tccccggcacctccaccagtttt

SEQ ID NO: 55161 - DNA, 24 bp, Artificial Sequence
  Probe
tccccggcacctccaccagttttg

SEQ ID NO: 55162 - DNA, 25 bp, Artificial Sequence
  Probe
tccccggcacctccaccagttttgg

SEQ ID NO: 55163 - DNA, 18 bp, Artificial Sequence
  Probe
tccccggcacctccattc

SEQ ID NO: 55164 - DNA, 19 bp, Artificial Sequence
  Probe
tccccggcacctccattcc

SEQ ID NO: 55165 - DNA, 20 bp, Artificial Sequence
  Probe
tccccggcacctccattcct

SEQ ID NO: 55166 - DNA, 18 bp, Artificial Sequence
  Probe
tccccggcatctccattg

SEQ ID NO: 55167 - DNA, 19 bp, Artificial Sequence
  Probe
tccccggcatctccattgt

SEQ ID NO: 55168 - DNA, 20 bp, Artificial Sequence
  Probe
tccccggcatctccattgta

SEQ ID NO: 55169 - DNA, 21 bp, Artificial Sequence
  Probe
tccccggcatctccattgtag

SEQ ID NO: 55170 - DNA, 15 bp, Artificial Sequence
  Probe
tcccgccttttttcc

SEQ ID NO: 55171 - DNA, 16 bp, Artificial Sequence
  Probe
tcccgccttttttccc

SEQ ID NO: 55172 - DNA, 17 bp, Artificial Sequence
  Probe
tcccgccttttttcccg

SEQ ID NO: 55173 - DNA, 18 bp, Artificial Sequence
  Probe
tcccgccttttttcccgg

SEQ ID NO: 55174 - DNA, 19 bp, Artificial Sequence
  Probe
tcccgccttttttcccggc

SEQ ID NO: 55175 - DNA, 20 bp, Artificial Sequence
  Probe
tcccgccttttttcccggcg

SEQ ID NO: 55176 - DNA, 21 bp, Artificial Sequence
  Probe
tcccgccttttttcccggcgg

SEQ ID NO: 55177 - DNA, 23 bp, Artificial Sequence
  Probe
tcccgccttttttcccggcggcg

SEQ ID NO: 55178 - DNA, 25 bp, Artificial Sequence
  Probe
tcccgccttttttcccggcggcggg

SEQ ID NO: 55179 - DNA, 26 bp, Artificial Sequence
  Probe
tcccgccttttttcccggcggcggga

SEQ ID NO: 55180 - DNA, 27 bp, Artificial Sequence
  Probe
tcccgccttttttcccggcggcgggag

SEQ ID NO: 55181 - DNA, 28 bp, Artificial Sequence
  Probe
tcccgccttttttcccggcggcgggaga

SEQ ID NO: 55182 - DNA, 30 bp, Artificial Sequence; identical to SEQ ID NO: 7829
  Probe

SEQ ID NO: 55183 - DNA, 31 bp, Artificial Sequence; identical to SEQ ID NO: 7830
  Probe

SEQ ID NO: 55184 - DNA, 32 bp, Artificial Sequence; identical to SEQ ID NO: 7831
  Probe

SEQ ID NO: 55185 - DNA, 17 bp, Artificial Sequence
  Probe
tcccggacgagccccct

SEQ ID NO: 55186 - DNA, 19 bp, Artificial Sequence
  Probe
tcccggacgagcccccttt

SEQ ID NO: 55187 - DNA, 16 bp, Artificial Sequence
  Probe
tcccgggtttcggcac

SEQ ID NO: 55188 - DNA, 19 bp, Artificial Sequence
  Probe
tcccgggtttcggcacttc

SEQ ID NO: 55189 - DNA, 17 bp, Artificial Sequence
  Probe
tcccggtcagggaacca

SEQ ID NO: 55190 - DNA, 16 bp, Artificial Sequence
  Probe
tccctggtggtctagt

SEQ ID NO: 55191 - DNA, 17 bp, Artificial Sequence
  Probe
tccctggtggtctagtg

SEQ ID NO: 55192 - DNA, 18 bp, Artificial Sequence
  Probe
tccctggtggtctagtgg

SEQ ID NO: 55193 - DNA, 20 bp, Artificial Sequence
  Probe
tccctggtggtctagtggct

SEQ ID NO: 55194 - DNA, 22 bp, Artificial Sequence
  Probe
tccctggtggtctagtggctag

SEQ ID NO: 55195 - DNA, 23 bp, Artificial Sequence
  Probe
tccctggtggtctagtggctagg

SEQ ID NO: 55196 - DNA, 24 bp, Artificial Sequence
  Probe
tccctggtggtctagtggctagga

SEQ ID NO: 55197 - DNA, 25 bp, Artificial Sequence
  Probe
tccctggtggtctagtggctaggat

SEQ ID NO: 55198 - DNA, 26 bp, Artificial Sequence
  Probe
tccctggtggtctagtggctaggatt

SEQ ID NO: 55199 - DNA, 31 bp, Artificial Sequence; identical to SEQ ID NO: 1671
  Probe

SEQ ID NO: 55200 - DNA, 33 bp, Artificial Sequence; identical to SEQ ID NO: 1673
  Probe

SEQ ID NO: 55201 - DNA, 19 bp, Artificial Sequence
  Probe
tccctggtggtctagtggt

SEQ ID NO: 55202 - DNA, 20 bp, Artificial Sequence
  Probe
tccctggtggtctagtggtt

SEQ ID NO: 55203 - DNA, 21 bp, Artificial Sequence
  Probe
tccctggtggtctagtggtta

SEQ ID NO: 55204 - DNA, 22 bp, Artificial Sequence
  Probe
tccctggtggtctagtggttag

SEQ ID NO: 55205 - DNA, 23 bp, Artificial Sequence
  Probe
tccctggtggtctagtggttagg

SEQ ID NO: 55206 - DNA, 24 bp, Artificial Sequence
  Probe
tccctggtggtctagtggttagga

SEQ ID NO: 55207 - DNA, 25 bp, Artificial Sequence
  Probe
tccctggtggtctagtggttaggat

SEQ ID NO: 55208 - DNA, 26 bp, Artificial Sequence
  Probe
tccctggtggtctagtggttaggatt

SEQ ID NO: 55209 - DNA, 27 bp, Artificial Sequence
  Probe
tccctggtggtctagtggttaggattc

SEQ ID NO: 55210 - DNA, 28 bp, Artificial Sequence
  Probe
tccctggtggtctagtggttaggattcg

SEQ ID NO: 55211 - DNA, 29 bp, Artificial Sequence
  Probe
tccctggtggtctagtggttaggattcgg

SEQ ID NO: 55212 - DNA, 30 bp, Artificial Sequence; identical to SEQ ID NO: 7870
  Probe

SEQ ID NO: 55213 - DNA, 40 bp, Artificial Sequence; identical to SEQ ID NO: 1688
  Probe

SEQ ID NO: 55214 - DNA, 41 bp, Artificial Sequence; identical to SEQ ID NO: 7871
  Probe

SEQ ID NO: 55215 - DNA, 43 bp, Artificial Sequence; identical to SEQ ID NO: 7872
  Probe

SEQ ID NO: 55216 - DNA, 44 bp, Artificial Sequence; identical to SEQ ID NO: 7873
  Probe

SEQ ID NO: 55217 - DNA, 45 bp, Artificial Sequence; identical to SEQ ID NO: 7874
  Probe

SEQ ID NO: 55218 - DNA, 46 bp, Artificial Sequence; identical to SEQ ID NO: 7875
  Probe

SEQ ID NO: 55219 - DNA, 48 bp, Artificial Sequence; identical to SEQ ID NO: 7877
  Probe

SEQ ID NO: 55220 - DNA, 49 bp, Artificial Sequence; identical to SEQ ID NO: 1690
  Probe

SEQ ID NO: 55221 - DNA, 28 bp, Artificial Sequence
  Probe
tccgtagtgtagtggttatcacgttcgc

SEQ ID NO: 55222 - DNA, 29 bp, Artificial Sequence
  Probe
tccgtagtgtagtggttatcacgttcgcc

SEQ ID NO: 55223 - DNA, 50 bp, Artificial Sequence; identical to SEQ ID NO: 23965
  Probe

SEQ ID NO: 55224 - DNA, 37 bp, Artificial Sequence
  Probe
tccgtagtgtagtggttatcacgttcgcctcacacgc

SEQ ID NO: 55225 - DNA, 50 bp, Artificial Sequence; identical to SEQ ID NO: 7899
  Probe

SEQ ID NO: 55226 - DNA, 19 bp, Artificial Sequence
  Probe
tcctagcctttctattagc

SEQ ID NO: 55227 - DNA, 20 bp, Artificial Sequence
  Probe
tcctcacacggggcacaata

SEQ ID NO: 55228 - DNA, 31 bp, Artificial Sequence; identical to SEQ ID NO: 41864
  Probe

SEQ ID NO: 55229 - DNA, 35 bp, Artificial Sequence; identical to SEQ ID NO: 23986
  Probe

SEQ ID NO: 55230 - DNA, 18 bp, Artificial Sequence
  Probe
tcctcgctggggcctcct

SEQ ID NO: 55231 - DNA, 16 bp, Artificial Sequence
  Probe
tcctcgttagtatagt

SEQ ID NO: 55232 - DNA, 20 bp, Artificial Sequence
  Probe
tcctcgttagtatagtggtg

SEQ ID NO: 55233 - DNA, 21 bp, Artificial Sequence
  Probe
tcctcgttagtatagtggtga

SEQ ID NO: 55234 - DNA, 37 bp, Artificial Sequence; identical to SEQ ID NO: 1708
  Probe

SEQ ID NO: 55235 - DNA, 39 bp, Artificial Sequence; identical to SEQ ID NO: 1710
  Probe

SEQ ID NO: 55236 - DNA, 46 bp, Artificial Sequence
  Probe
tcctcgttagtatagtggtgagtatccccgcctgtcacgcgggaga

SEQ ID NO: 55237 - DNA, 24 bp, Artificial Sequence
  Probe
tcctcgttagtatagtggtgagtg

SEQ ID NO: 55238 - DNA, 23 bp, Artificial Sequence
  Probe
tcctcgttagtatagtggttagt

SEQ ID NO: 55239 - DNA, 26 bp, Artificial Sequence
  Probe
tcctcgttagtatagtggttagtatc

SEQ ID NO: 55240 - DNA, 27 bp, Artificial Sequence
  Probe
tcctcgttagtatagtggttagtatcc

SEQ ID NO: 55241 - DNA, 29 bp, Artificial Sequence
  Probe
tcctcgttagtatagtggttagtatcccc

SEQ ID NO: 55242 - DNA, 30 bp, Artificial Sequence; identical to SEQ ID NO: 11933
  Probe

SEQ ID NO: 55243 - DNA, 31 bp, Artificial Sequence; identical to SEQ ID NO: 37386
  Probe

SEQ ID NO: 55244 - DNA, 35 bp, Artificial Sequence; identical to SEQ ID NO: 1717
  Probe

SEQ ID NO: 55245 - DNA, 50 bp, Artificial Sequence; identical to SEQ ID NO: 7930
  Probe

SEQ ID NO: 55246 - DNA, 22 bp, Artificial Sequence
  Probe
tcgaaaccatcctctgctaggt

SEQ ID NO: 55247 - DNA, 21 bp, Artificial Sequence
  Probe
tcgaaaccatcctctgctatc

SEQ ID NO: 55248 - DNA, 22 bp, Artificial Sequence
  Probe
tcgaaaccgggcggaaacacct

SEQ ID NO: 55249 - DNA, 22 bp, Artificial Sequence
  Probe
tcgaaccccgtccgtgcctgat

SEQ ID NO: 55250 - DNA, 35 bp, Artificial Sequence; identical to SEQ ID NO: 7941
  Probe

SEQ ID NO: 55251 - DNA, 22 bp, Artificial Sequence
  Probe
tcgaatcccaccgctgccacac

SEQ ID NO: 55252 - DNA, 22 bp, Artificial Sequence
  Probe
tcgaatcccaccgctgccaggt

SEQ ID NO: 55253 - DNA, 22 bp, Artificial Sequence
  Probe
tcgaatcccacttctgacacaa

SEQ ID NO: 55254 - DNA, 22 bp, Artificial Sequence
  Probe
tcgaatcccagcggtgcctccg

SEQ ID NO: 55255 - DNA, 20 bp, Artificial Sequence
  Probe
tcgaatcccatcctcgtcgc

SEQ ID NO: 55256 - DNA, 21 bp, Artificial Sequence
  Probe
tcgaatcccatcctcgtcgct

SEQ ID NO: 55257 - DNA, 22 bp, Artificial Sequence
  Probe
tcgaatcccatcctcgtcgctc

SEQ ID NO: 55258 - DNA, 23 bp, Artificial Sequence
  Probe
tcgaatcccatcctcgtcgctcg

SEQ ID NO: 55259 - DNA, 23 bp, Artificial Sequence
  Probe
tcgaatcccatcctcgtcggcta

SEQ ID NO: 55260 - DNA, 17 bp, Artificial Sequence
  Probe
tcgaatccgagtcacgg

SEQ ID NO: 55261 - DNA, 19 bp, Artificial Sequence
  Probe
tcgaatccgagtcacggca

SEQ ID NO: 55262 - DNA, 20 bp, Artificial Sequence
  Probe
tcgaatccgagtcacggcaa

SEQ ID NO: 55263 - DNA, 21 bp, Artificial Sequence
  Probe
tcgaatccgagtcacggcaaa

SEQ ID NO: 55264 - DNA, 22 bp, Artificial Sequence
  Probe
tcgaatccgagtcacggcaaag

SEQ ID NO: 55265 - DNA, 20 bp, Artificial Sequence
  Probe
tcgaatccgagtcacggcag

SEQ ID NO: 55266 - DNA, 21 bp, Artificial Sequence
  Probe
tcgaatccgagtcacggcagg

SEQ ID NO: 55267 - DNA, 22 bp, Artificial Sequence
  Probe
tcgaatccgagtcacggcagga

SEQ ID NO: 55268 - DNA, 22 bp, Artificial Sequence
  Probe
tcgaatccgagtcacggcaggt

SEQ ID NO: 55269 - DNA, 23 bp, Artificial Sequence
  Probe
tcgaatccgagtcacggcaggtg

SEQ ID NO: 55270 - DNA, 24 bp, Artificial Sequence
  Probe
tcgaatccgagtcacggcaggtgg

SEQ ID NO: 55271 - DNA, 20 bp, Artificial Sequence
  Probe
tcgaatccgagtcacggcat

SEQ ID NO: 55272 - DNA, 21 bp, Artificial Sequence
  Probe
tcgaatccgagtcacggcatt

SEQ ID NO: 55273 - DNA, 22 bp, Artificial Sequence
  Probe
tcgaatccgagtcacggcattg

SEQ ID NO: 55274 - DNA, 23 bp, Artificial Sequence
  Probe
tcgaatccgagtcacggcattgt

SEQ ID NO: 55275 - DNA, 24 bp, Artificial Sequence
  Probe
tcgaatccgagtcacggcattgtg

SEQ ID NO: 55276 - DNA, 25 bp, Artificial Sequence
  Probe
tcgaatccgagtcacggcattgtgg

SEQ ID NO: 55277 - DNA, 22 bp, Artificial Sequence
  Probe
tcgaatccggctcgaaggacga

SEQ ID NO: 55278 - DNA, 22 bp, Artificial Sequence
  Probe
tcgaatcctgccgactacggca

SEQ ID NO: 55279 - DNA, 22 bp, Artificial Sequence
  Probe
tcgaatcctgccgactacgtca

SEQ ID NO: 55280 - DNA, 38 bp, Artificial Sequence; identical to SEQ ID NO: 24034
  Probe

SEQ ID NO: 55281 - DNA, 21 bp, Artificial Sequence
  Probe
tcgactcccggtatgggaaca

SEQ ID NO: 55282 - DNA, 22 bp, Artificial Sequence
  Probe
tcgactcccggtatgggaacaa

SEQ ID NO: 55283 - DNA, 23 bp, Artificial Sequence
  Probe
tcgactcccggtatgggaacaaa

SEQ ID NO: 55284 - DNA, 21 bp, Artificial Sequence
  Probe
tcgactcccggtatgggaacg

SEQ ID NO: 55285 - DNA, 20 bp, Artificial Sequence
  Probe
tcgactcccggtgtgggaac

SEQ ID NO: 55286 - DNA, 21 bp, Artificial Sequence
  Probe
tcgactcccggtgtgggaacg

SEQ ID NO: 55287 - DNA, 22 bp, Artificial Sequence
  Probe
tcgactcccggtgtgggaacgc

SEQ ID NO: 55288 - DNA, 23 bp, Artificial Sequence
  Probe
tcgactcccggtgtgggaacgcc

SEQ ID NO: 55289 - DNA, 24 bp, Artificial Sequence
  Probe
tcgactcccggtgtgggaacgccg

SEQ ID NO: 55290 - DNA, 22 bp, Artificial Sequence
  Probe
tcgactcctggctggctcgcga

SEQ ID NO: 55291 - DNA, 22 bp, Artificial Sequence
  Probe
tcgagcccacccagggacgcct

SEQ ID NO: 55292 - DNA, 21 bp, Artificial Sequence
  Probe
tcgagccccagtggaaccacg

SEQ ID NO: 55293 - DNA, 22 bp, Artificial Sequence
  Probe
tcgagccccagtggaaccacgg

SEQ ID NO: 55294 - DNA, 23 bp, Artificial Sequence
  Probe
tcgagccccagtggaaccacggc

SEQ ID NO: 55295 - DNA, 24 bp, Artificial Sequence
  Probe
tcgagccccagtggaaccatagcc

SEQ ID NO: 55296 - DNA, 22 bp, Artificial Sequence
  Probe
tcgagtcccatctgggtcgcgt

SEQ ID NO: 55297 - DNA, 22 bp, Artificial Sequence
  Probe
tcgagtcccttcgtggtcgttg

SEQ ID NO: 55298 - DNA, 22 bp, Artificial Sequence
  Probe
tcgagtcctgccgcggtcgaag

SEQ ID NO: 55299 - DNA, 22 bp, Artificial Sequence
  Probe
tcgatccccagcatctccagtg

SEQ ID NO: 55300 - DNA, 21 bp, Artificial Sequence
  Probe
tcgatccccggcatctccatt

SEQ ID NO: 55301 - DNA, 22 bp, Artificial Sequence
  Probe
tcgatccccggcatctccattg

SEQ ID NO: 55302 - DNA, 23 bp, Artificial Sequence
  Probe
tcgatccccggcatctccattgt

SEQ ID NO: 55303 - DNA, 24 bp, Artificial Sequence
  Probe
tcgatccccggcatctccattgta

SEQ ID NO: 55304 - DNA, 22 bp, Artificial Sequence
  Probe
tcgatccccgtacgggccacga

SEQ ID NO: 55305 - DNA, 22 bp, Artificial Sequence
  Probe
tcgatccccgtacgggccactg

SEQ ID NO: 55306 - DNA, 22 bp, Artificial Sequence
  Probe
tcgatccccgtactggccacgt

SEQ ID NO: 55307 - DNA, 22 bp, Artificial Sequence
  Probe
tcgatcccgggcggaaacaggt

SEQ ID NO: 55308 - DNA, 22 bp, Artificial Sequence
  Probe
tcgatcctcacacggggcacaa

SEQ ID NO: 55309 - DNA, 23 bp, Artificial Sequence
  Probe
tcgatcctcacacggggcacaat

SEQ ID NO: 55310 - DNA, 22 bp, Artificial Sequence
  Probe
tcgatcctcgctggggcctcct

SEQ ID NO: 55311 - DNA, 21 bp, Artificial Sequence
  Probe
tcgatgcccgcatcctccact

SEQ ID NO: 55312 - DNA, 22 bp, Artificial Sequence
  Probe
tcgatgcccgcatcctccactc

SEQ ID NO: 55313 - DNA, 22 bp, Artificial Sequence
  Probe
tcgatgcccgcattctccatac

SEQ ID NO: 55314 - DNA, 22 bp, Artificial Sequence
  Probe
tcgattccccgacggggagaaa

SEQ ID NO: 55315 - DNA, 22 bp, Artificial Sequence
  Probe
tcgattccccgacggggaggca

SEQ ID NO: 55316 - DNA, 22 bp, Artificial Sequence
  Probe
tcgattcccggccaacgcaagt

SEQ ID NO: 55317 - DNA, 21 bp, Artificial Sequence
  Probe
tcgattcccggccaacgcagc

SEQ ID NO: 55318 - DNA, 22 bp, Artificial Sequence
  Probe
tcgattcccggccaacgcagtg

SEQ ID NO: 55319 - DNA, 23 bp, Artificial Sequence
  Probe
tcgattcccggccaacgcatgcg

SEQ ID NO: 55320 - DNA, 22 bp, Artificial Sequence
  Probe
tcgattcccggccaatgcacga

SEQ ID NO: 55321 - DNA, 22 bp, Artificial Sequence
  Probe
tcgattcccggccaatgcagca

SEQ ID NO: 55322 - DNA, 22 bp, Artificial Sequence
  Probe
tcgattcccggcccatgcagca

SEQ ID NO: 55323 - DNA, 22 bp, Artificial Sequence
  Probe
tcgattcccgggcggcgcactt

SEQ ID NO: 55324 - DNA, 22 bp, Artificial Sequence
  Probe
tcgattcccggtcagggaacaa

SEQ ID NO: 55325 - DNA, 22 bp, Artificial Sequence
  Probe
tcgattctcatagtcctagaaa

SEQ ID NO: 55326 - DNA, 46 bp, Artificial Sequence; identical to SEQ ID NO: 7988
  Probe

SEQ ID NO: 55327 - DNA, 50 bp, Artificial Sequence; identical to SEQ ID NO: 7991
  Probe

SEQ ID NO: 55328 - DNA, 22 bp, Artificial Sequence
  Probe
tcgcctgccacgcgggaggccc

SEQ ID NO: 55329 - DNA, 26 bp, Artificial Sequence
  Probe
tcgcctgccacgcgggaggcccgggt

SEQ ID NO: 55330 - DNA, 27 bp, Artificial Sequence
  Probe
tcgcctgccacgcgggaggcccgggtt

SEQ ID NO: 55331 - DNA, 24 bp, Artificial Sequence
  Probe
tcggcgctctcaccgccgcggccc

SEQ ID NO: 55332 - DNA, 24 bp, Artificial Sequence
  Probe
tcgggtgcgagaggtcccgggttc

SEQ ID NO: 55333 - DNA, 17 bp, Artificial Sequence
  Probe
tcggtagagcatcagac

SEQ ID NO: 55334 - DNA, 27 bp, Artificial Sequence
  Probe
tcggtagagcatgggactcttaatccc

SEQ ID NO: 55335 - DNA, 22 bp, Artificial Sequence
  Probe
tcgtaaacaggagatcctgggt

SEQ ID NO: 55336 - DNA, 23 bp, Artificial Sequence
  Probe
tcgtaaacaggagatcctgggtt

SEQ ID NO: 55337 - DNA, 29 bp, Artificial Sequence
  Probe
tcgtggttgtagtccgtgcgagaataatg

SEQ ID NO: 55338 - DNA, 27 bp, Artificial Sequence
  Probe
tcgttagtatagtggtgagtatccccg

SEQ ID NO: 55339 - DNA, 28 bp, Artificial Sequence
  Probe
tcgttagtatagtggtgagtatccccgc

SEQ ID NO: 55340 - DNA, 27 bp, Artificial Sequence
  Probe
tcgttggtctaggggtatgattctcgc

SEQ ID NO: 55341 - DNA, 35 bp, Artificial Sequence; identical to SEQ ID NO: 7996
  Probe

SEQ ID NO: 55342 - DNA, 24 bp, Artificial Sequence
  Probe
tctaacaacatggctttctcaact

SEQ ID NO: 55343 - DNA, 20 bp, Artificial Sequence
  Probe
tctaggggtatgattctcgc

SEQ ID NO: 55344 - DNA, 21 bp, Artificial Sequence
  Probe
tctaggggtatgattctcgct

SEQ ID NO: 55345 - DNA, 20 bp, Artificial Sequence
  Probe
tctaggggtatgattctcgg

SEQ ID NO: 55346 - DNA, 21 bp, Artificial Sequence
  Probe
tctaggggtatgattctcggt

SEQ ID NO: 55347 - DNA, 25 bp, Artificial Sequence
  Probe
tctagtggttaggattcggcgctct

SEQ ID NO: 55348 - DNA, 27 bp, Artificial Sequence
  Probe
tctagtggttaggattcggcgctctca

SEQ ID NO: 55349 - DNA, 38 bp, Artificial Sequence
  Probe
tctagtggttaggattcggcgctctcaccgccgcggcc

SEQ ID NO: 55350 - DNA, 40 bp, Artificial Sequence
  Probe
tctagtggttaggattcggcgctctcaccgccgcggcccg

SEQ ID NO: 55351 - DNA, 43 bp, Artificial Sequence; identical to SEQ ID NO: 34782
  Probe

SEQ ID NO: 55352 - DNA, 22 bp, Artificial Sequence
  Probe
tctcaccgccgcggcccgggtt

SEQ ID NO: 55353 - DNA, 23 bp, Artificial Sequence
  Probe
tctcaccgccgcggcccgggttc

SEQ ID NO: 55354 - DNA, 36 bp, Artificial Sequence; identical to SEQ ID NO: 8002
  Probe

SEQ ID NO: 55355 - DNA, 22 bp, Artificial Sequence
  Probe
tctcataatctgaaggtcctga

SEQ ID NO: 55356 - DNA, 23 bp, Artificial Sequence
  Probe
tctcataatctgaaggtcctgag

SEQ ID NO: 55357 - DNA, 24 bp, Artificial Sequence
  Probe
tctcataatctgaaggtcctgagt

SEQ ID NO: 55358 - DNA, 21 bp, Artificial Sequence
  Probe
tctcataatctgaaggtcgtg

SEQ ID NO: 55359 - DNA, 22 bp, Artificial Sequence
  Probe
tctcataatctgaaggtcgtga

SEQ ID NO: 55360 - DNA, 23 bp, Artificial Sequence
  Probe
tctcataatctgaaggtcgtgag

SEQ ID NO: 55361 - DNA, 25 bp, Artificial Sequence
  Probe
tctcataatctgaaggtcgtgagtt

SEQ ID NO: 55362 - DNA, 28 bp, Artificial Sequence
  Probe
tctcgcctgccacgcgggaggcccgggt

SEQ ID NO: 55363 - DNA, 25 bp, Artificial Sequence
  Probe
tctcgcttagggtgcgagaggtccc

SEQ ID NO: 55364 - DNA, 25 bp, Artificial Sequence
  Probe
tctcgcttcgggtgcgagaggtccc

SEQ ID NO: 55365 - DNA, 25 bp, Artificial Sequence
  Probe
tctcgctttgggtgcgagaggtccc

SEQ ID NO: 55366 - DNA, 24 bp, Artificial Sequence
  Probe
tctcgtaaacaggagatcctgggt

SEQ ID NO: 55367 - DNA, 38 bp, Artificial Sequence
  Probe
tctgaatccagcgatccgagttcaaatctcggtggaac

SEQ ID NO: 55368 - DNA, 35 bp, Artificial Sequence; identical to SEQ ID NO: 8008
  Probe

SEQ ID NO: 55369 - DNA, 36 bp, Artificial Sequence; identical to SEQ ID NO: 8009
  Probe

SEQ ID NO: 55370 - DNA, 37 bp, Artificial Sequence; identical to SEQ ID NO: 8010
  Probe

SEQ ID NO: 55371 - DNA, 22 bp, Artificial Sequence
  Probe
tctgagggtccagggttcaagt

SEQ ID NO: 55372 - DNA, 45 bp, Artificial Sequence; identical to SEQ ID NO: 50781
  Probe

SEQ ID NO: 55373 - DNA, 17 bp, Artificial Sequence
  Probe
tcttgcgacccgggttc

SEQ ID NO: 55374 - DNA, 25 bp, Artificial Sequence
  Probe
tgaaaacctttttccaaggacaaat

SEQ ID NO: 55375 - DNA, 19 bp, Artificial Sequence
  Probe
tgaatccagcgatccgagt

SEQ ID NO: 55376 - DNA, 21 bp, Artificial Sequence
  Probe
tgaatccagcgatccgagttc

SEQ ID NO: 55377 - DNA, 22 bp, Artificial Sequence
  Probe
tgaatccagcgatccgagttca

SEQ ID NO: 55378 - DNA, 39 bp, Artificial Sequence; identical to SEQ ID NO: 8031
  Probe

SEQ ID NO: 55379 - DNA, 40 bp, Artificial Sequence; identical to SEQ ID NO: 8032
  Probe

SEQ ID NO: 55380 - DNA, 41 bp, Artificial Sequence; identical to SEQ ID NO: 8033
  Probe

SEQ ID NO: 55381 - DNA, 39 bp, Artificial Sequence; identical to SEQ ID NO: 8035
  Probe

SEQ ID NO: 55382 - DNA, 21 bp, Artificial Sequence
  Probe
tgaatctgacaacagaggctt

SEQ ID NO: 55383 - DNA, 25 bp, Artificial Sequence
  Probe
tgaatctgacaacagaggcttacga

SEQ ID NO: 55384 - DNA, 26 bp, Artificial Sequence
  Probe
tgaatctgacaacagaggcttacgac

SEQ ID NO: 55385 - DNA, 27 bp, Artificial Sequence
  Probe
tgaatctgacaacagaggcttacgacc

SEQ ID NO: 55386 - DNA, 28 bp, Artificial Sequence
  Probe
tgaatctgacaacagaggcttacgaccc

SEQ ID NO: 55387 - DNA, 29 bp, Artificial Sequence
  Probe
tgaatctgacaacagaggcttacgacccc

SEQ ID NO: 55388 - DNA, 30 bp, Artificial Sequence; identical to SEQ ID NO: 1734
  Probe

SEQ ID NO: 55389 - DNA, 31 bp, Artificial Sequence; identical to SEQ ID NO: 1735
  Probe

SEQ ID NO: 55390 - DNA, 33 bp, Artificial Sequence; identical to SEQ ID NO: 1737
  Probe

SEQ ID NO: 55391 - DNA, 34 bp, Artificial Sequence; identical to SEQ ID NO: 1738
  Probe

SEQ ID NO: 55392 - DNA, 35 bp, Artificial Sequence; identical to SEQ ID NO: 1739
  Probe

SEQ ID NO: 55393 - DNA, 37 bp, Artificial Sequence; identical to SEQ ID NO: 1741
  Probe

SEQ ID NO: 55394 - DNA, 39 bp, Artificial Sequence; identical to SEQ ID NO: 8042
  Probe

SEQ ID NO: 55395 - DNA, 40 bp, Artificial Sequence; identical to SEQ ID NO: 8043
  Probe

SEQ ID NO: 55396 - DNA, 41 bp, Artificial Sequence; identical to SEQ ID NO: 8044
  Probe

SEQ ID NO: 55397 - DNA, 42 bp, Artificial Sequence; identical to SEQ ID NO: 8045
  Probe

SEQ ID NO: 55398 - DNA, 43 bp, Artificial Sequence; identical to SEQ ID NO: 8046
  Probe

SEQ ID NO: 55399 - DNA, 44 bp, Artificial Sequence; identical to SEQ ID NO: 8047
  Probe

SEQ ID NO: 55400 - DNA, 50 bp, Artificial Sequence; identical to SEQ ID NO: 50803
  Probe

SEQ ID NO: 55401 - DNA, 29 bp, Artificial Sequence
  Probe
tgacaacagaggcttacgaccccttattt

SEQ ID NO: 55402 - DNA, 32 bp, Artificial Sequence; identical to SEQ ID NO: 1745
  Probe

SEQ ID NO: 55403 - DNA, 33 bp, Artificial Sequence; identical to SEQ ID NO: 8057
  Probe

SEQ ID NO: 55404 - DNA, 34 bp, Artificial Sequence; identical to SEQ ID NO: 8058
  Probe

SEQ ID NO: 55405 - DNA, 35 bp, Artificial Sequence; identical to SEQ ID NO: 8059
  Probe

SEQ ID NO: 55406 - DNA, 26 bp, Artificial Sequence
  Probe
tgactacggatcagaagattccaggt

SEQ ID NO: 55407 - DNA, 27 bp, Artificial Sequence
  Probe
tgactacggatcagaagattccaggtt

SEQ ID NO: 55408 - DNA, 26 bp, Artificial Sequence
  Probe
tgactacggatcagaagattctaggt

SEQ ID NO: 55409 - DNA, 27 bp, Artificial Sequence
  Probe
tgactacggatcagaagattctaggtt

SEQ ID NO: 55410 - DNA, 31 bp, Artificial Sequence; identical to SEQ ID NO: 8063
  Probe

SEQ ID NO: 55411 - DNA, 33 bp, Artificial Sequence
  Probe
tgagctaaacctagccccaaacccactccacct

SEQ ID NO: 55412 - DNA, 50 bp, Artificial Sequence
  Probe
tgataaaagagttactttgatagagtaaataataggagcttaaaccccct

SEQ ID NO: 55413 - DNA, 22 bp, Artificial Sequence
  Probe
tgataatcatatttaccaaatg

SEQ ID NO: 55414 - DNA, 44 bp, Artificial Sequence; identical to SEQ ID NO: 8071
  Probe

SEQ ID NO: 55415 - DNA, 32 bp, Artificial Sequence; identical to SEQ ID NO: 8074
  Probe

SEQ ID NO: 55416 - DNA, 28 bp, Artificial Sequence
  Probe
tgattctcgcttagggtgcgagaggtcc

SEQ ID NO: 55417 - DNA, 29 bp, Artificial Sequence
  Probe
tgattctcgcttagggtgcgagaggtccc

SEQ ID NO: 55418 - DNA, 30 bp, Artificial Sequence; identical to SEQ ID NO: 24223
  Probe

SEQ ID NO: 55419 - DNA, 31 bp, Artificial Sequence
  Probe
tgattctcgcttagggtgcgagaggtcccgg

SEQ ID NO: 55420 - DNA, 28 bp, Artificial Sequence
  Probe
tgattctcgcttcgggtgcgagaggtcc

SEQ ID NO: 55421 - DNA, 29 bp, Artificial Sequence
  Probe
tgattctcgcttcgggtgcgagaggtccc

SEQ ID NO: 55422 - DNA, 30 bp, Artificial Sequence; identical to SEQ ID NO: 24225
  Probe

SEQ ID NO: 55423 - DNA, 31 bp, Artificial Sequence
  Probe
tgattctcgcttcgggtgcgagaggtcccgg

SEQ ID NO: 55424 - DNA, 28 bp, Artificial Sequence
  Probe
tgattctcgctttgggtgcgagaggtcc

SEQ ID NO: 55425 - DNA, 29 bp, Artificial Sequence
  Probe
tgattctcgctttgggtgcgagaggtccc

SEQ ID NO: 55426 - DNA, 30 bp, Artificial Sequence; identical to SEQ ID NO: 24227
  Probe

SEQ ID NO: 55427 - DNA, 31 bp, Artificial Sequence
  Probe
tgattctcgctttgggtgcgagaggtcccgg

SEQ ID NO: 55428 - DNA, 29 bp, Artificial Sequence
  Probe
tgattctcggtttgggtccgagaggtccc

SEQ ID NO: 55429 - DNA, 30 bp, Artificial Sequence
  Probe
tgattctcggtttgggtccgagaggtcccg

SEQ ID NO: 55430 - DNA, 41 bp, Artificial Sequence; identical to SEQ ID NO: 8081
  Probe

SEQ ID NO: 55431 - DNA, 42 bp, Artificial Sequence; identical to SEQ ID NO: 8082
  Probe

SEQ ID NO: 55432 - DNA, 29 bp, Artificial Sequence
  Probe
tgcagagtggggttttgcagtccttagct

SEQ ID NO: 55433 - DNA, 23 bp, Artificial Sequence
  Probe
tgccacgcgggaggcccgggttc

SEQ ID NO: 55434 - DNA, 38 bp, Artificial Sequence; identical to SEQ ID NO: 42046
  Probe

SEQ ID NO: 55435 - DNA, 39 bp, Artificial Sequence; identical to SEQ ID NO: 42047
  Probe

SEQ ID NO: 55436 - DNA, 40 bp, Artificial Sequence
  Probe
tgccacgcgggaggcccgggttcgattcccggccaatgca

SEQ ID NO: 55437 - DNA, 50 bp, Artificial Sequence
  Probe
tgccacgcgggaggcccgggttcgattcccggccaatgcactttcatttt

SEQ ID NO: 55438 - DNA, 23 bp, Artificial Sequence
  Probe
tgccacgcgggaggcccgggttt

SEQ ID NO: 55439 - DNA, 24 bp, Artificial Sequence
  Probe
tgccacgcgggaggcccgggtttg

SEQ ID NO: 55440 - DNA, 21 bp, Artificial Sequence
  Probe
tgcccccatgtctaacaacat

SEQ ID NO: 55441 - DNA, 25 bp, Artificial Sequence
  Probe
tgcccccatgtctaacaacatggct

SEQ ID NO: 55442 - DNA, 26 bp, Artificial Sequence
  Probe
tgcccccatgtctaacaacatggctt

SEQ ID NO: 55443 - DNA, 27 bp, Artificial Sequence
  Probe
tgcccccatgtctaacaacatggcttt

SEQ ID NO: 55444 - DNA, 28 bp, Artificial Sequence
  Probe
tgcccccatgtctaacaacatggctttc

SEQ ID NO: 55445 - DNA, 29 bp, Artificial Sequence
  Probe
tgcccccatgtctaacaacatggctttct

SEQ ID NO: 55446 - DNA, 30 bp, Artificial Sequence; identical to SEQ ID NO: 8103
  Probe

SEQ ID NO: 55447 - DNA, 31 bp, Artificial Sequence; identical to SEQ ID NO: 8104
  Probe

SEQ ID NO: 55448 - DNA, 32 bp, Artificial Sequence; identical to SEQ ID NO: 8105
  Probe

SEQ ID NO: 55449 - DNA, 33 bp, Artificial Sequence; identical to SEQ ID NO: 8106
  Probe

SEQ ID NO: 55450 - DNA, 34 bp, Artificial Sequence; identical to SEQ ID NO: 8107
  Probe

SEQ ID NO: 55451 - DNA, 29 bp, Artificial Sequence
  Probe
tgcccctcatttacataaatattatacta

SEQ ID NO: 55452 - DNA, 17 bp, Artificial Sequence
  Probe
tgcccgcatcctccact

SEQ ID NO: 55453 - DNA, 23 bp, Artificial Sequence
  Probe
tgccgtgatcgtatagtggttag

SEQ ID NO: 55454 - DNA, 24 bp, Artificial Sequence
  Probe
tgccgtgatcgtatagtggttagt

SEQ ID NO: 55455 - DNA, 27 bp, Artificial Sequence
  Probe
tgccgtgatcgtatagtggttagtact

SEQ ID NO: 55456 - DNA, 31 bp, Artificial Sequence; identical to SEQ ID NO: 8115
  Probe

SEQ ID NO: 55457 - DNA, 32 bp, Artificial Sequence; identical to SEQ ID NO: 8116
  Probe

SEQ ID NO: 55458 - DNA, 34 bp, Artificial Sequence; identical to SEQ ID NO: 8117
  Probe

SEQ ID NO: 55459 - DNA, 36 bp, Artificial Sequence; identical to SEQ ID NO: 1756
  Probe

SEQ ID NO: 55460 - DNA, 36 bp, Artificial Sequence; identical to SEQ ID NO: 8127
  Probe

SEQ ID NO: 55461 - DNA, 37 bp, Artificial Sequence; identical to SEQ ID NO: 8128
  Probe

SEQ ID NO: 55462 - DNA, 38 bp, Artificial Sequence; identical to SEQ ID NO: 8129
  Probe

SEQ ID NO: 55463 - DNA, 39 bp, Artificial Sequence; identical to SEQ ID NO: 8130
  Probe

SEQ ID NO: 55464 - DNA, 40 bp, Artificial Sequence; identical to SEQ ID NO: 8131
  Probe

SEQ ID NO: 55465 - DNA, 42 bp, Artificial Sequence; identical to SEQ ID NO: 24325
  Probe

SEQ ID NO: 55466 - DNA, 43 bp, Artificial Sequence; identical to SEQ ID NO: 8133
  Probe

SEQ ID NO: 55467 - DNA, 44 bp, Artificial Sequence; identical to SEQ ID NO: 8134
  Probe

SEQ ID NO: 55468 - DNA, 25 bp, Artificial Sequence
  Probe
tgctaataacgccaaggtcgcgggt

SEQ ID NO: 55469 - DNA, 26 bp, Artificial Sequence
  Probe
tgctaataacgccaaggtcgcgggtt

SEQ ID NO: 55470 - DNA, 36 bp, Artificial Sequence; identical to SEQ ID NO: 8139
  Probe

SEQ ID NO: 55471 - DNA, 38 bp, Artificial Sequence; identical to SEQ ID NO: 8140
  Probe

SEQ ID NO: 55472 - DNA, 40 bp, Artificial Sequence; identical to SEQ ID NO: 8142
  Probe

SEQ ID NO: 55473 - DNA, 41 bp, Artificial Sequence; identical to SEQ ID NO: 8143
  Probe

SEQ ID NO: 55474 - DNA, 43 bp, Artificial Sequence; identical to SEQ ID NO: 8145
  Probe

SEQ ID NO: 55475 - DNA, 27 bp, Artificial Sequence
  Probe
tggagttaaagactttttctctgattt

SEQ ID NO: 55476 - DNA, 27 bp, Artificial Sequence
  Probe
tggcctcctaagccagggattgtgggt

SEQ ID NO: 55477 - DNA, 21 bp, Artificial Sequence
  Probe
tgggtgcgagaggtcccgggt

SEQ ID NO: 55478 - DNA, 22 bp, Artificial Sequence
  Probe
tgggtgcgagaggtcccgggtt

SEQ ID NO: 55479 - DNA, 50 bp, Artificial Sequence
  Probe
tgggtgcgagaggtcccgggttcaaatcccggacgagcccccttttcctt

SEQ ID NO: 55480 - DNA, 40 bp, Artificial Sequence; identical to SEQ ID NO: 8164
  Probe

SEQ ID NO: 55481 - DNA, 16 bp, Artificial Sequence
  Probe
tggtagaattctcgcc

SEQ ID NO: 55482 - DNA, 18 bp, Artificial Sequence
  Probe
tggtagaattctcgcctg

SEQ ID NO: 55483 - DNA, 19 bp, Artificial Sequence
  Probe
tggtagaattctcgcctgc

SEQ ID NO: 55484 - DNA, 20 bp, Artificial Sequence
  Probe
tggtagaattctcgcctgcc

SEQ ID NO: 55485 - DNA, 21 bp, Artificial Sequence
  Probe
tggtagaattctcgcctgcca

SEQ ID NO: 55486 - DNA, 22 bp, Artificial Sequence
  Probe
tggtagaattctcgcctgccac

SEQ ID NO: 55487 - DNA, 25 bp, Artificial Sequence
  Probe
tggtagaattctcgcctgccacgcg

SEQ ID NO: 55488 - DNA, 34 bp, Artificial Sequence; identical to SEQ ID NO: 24375
  Probe

SEQ ID NO: 55489 - DNA, 37 bp, Artificial Sequence; identical to SEQ ID NO: 24376
  Probe

SEQ ID NO: 55490 - DNA, 38 bp, Artificial Sequence; identical to SEQ ID NO: 24377
  Probe

SEQ ID NO: 55491 - DNA, 28 bp, Artificial Sequence
  Probe
tggtatatagtttaaacaaaacgaatga

SEQ ID NO: 55492 - DNA, 30 bp, Artificial Sequence; identical to SEQ ID NO: 24388
  Probe

SEQ ID NO: 55493 - DNA, 37 bp, Artificial Sequence; identical to SEQ ID NO: 1772
  Probe

SEQ ID NO: 55494 - DNA, 38 bp, Artificial Sequence; identical to SEQ ID NO: 8175
  Probe

SEQ ID NO: 55495 - DNA, 50 bp, Artificial Sequence; identical to SEQ ID NO: 1773
  Probe

SEQ ID NO: 55496 - DNA, 30 bp, Artificial Sequence
  Probe
tggtatcatgcaagattcccattcttgcga

SEQ ID NO: 55497 - DNA, 34 bp, Artificial Sequence
  Probe
tggtatcatgcaagattcccattcttgcgacccg

SEQ ID NO: 55498 - DNA, 39 bp, Artificial Sequence
  Probe
tggtatcatgcaagattcccattcttgcgacccgggttc

SEQ ID NO: 55499 - DNA, 32 bp, Artificial Sequence; identical to SEQ ID NO: 8180
  Probe

SEQ ID NO: 55500 - DNA, 21 bp, Artificial Sequence
  Probe
tggtctagcggttaggattcc

SEQ ID NO: 55501 - DNA, 23 bp, Artificial Sequence
  Probe
tggtctagcggttaggattcctg

SEQ ID NO: 55502 - DNA, 32 bp, Artificial Sequence
  Probe
tggtctagcggttaggattcctggttttcacc

SEQ ID NO: 55503 - DNA, 33 bp, Artificial Sequence
  Probe
tggtctagcggttaggattcctggttttcaccc

SEQ ID NO: 55504 - DNA, 42 bp, Artificial Sequence
  Probe
tggtctagcggttaggattcctggttttcacccaggcggccc

SEQ ID NO: 55505 - DNA, 23 bp, Artificial Sequence
  Probe
tggtctaggggtatgattctcgc

SEQ ID NO: 55506 - DNA, 24 bp, Artificial Sequence
  Probe
tggtctaggggtatgattctcgct

SEQ ID NO: 55507 - DNA, 25 bp, Artificial Sequence
  Probe
tggtctagtggttaggattcggcgc

SEQ ID NO: 55508 - DNA, 26 bp, Artificial Sequence
  Probe
tggtctagtggttaggattcggcgct

SEQ ID NO: 55509 - DNA, 28 bp, Artificial Sequence
  Probe
tggtctagtggttaggattcggcgctct

SEQ ID NO: 55510 - DNA, 30 bp, Artificial Sequence; identical to SEQ ID NO: 14406
  Probe

SEQ ID NO: 55511 - DNA, 32 bp, Artificial Sequence
  Probe
tggtctagtggttaggattcggcgctctcacc

SEQ ID NO: 55512 - DNA, 35 bp, Artificial Sequence
  Probe
tggtctagtggttaggattcggcgctctcaccgcc

SEQ ID NO: 55513 - DNA, 34 bp, Artificial Sequence; identical to SEQ ID NO: 14407
  Probe

SEQ ID NO: 55514 - DNA, 16 bp, Artificial Sequence
  Probe
tggtgagtatccccgc

SEQ ID NO: 55515 - DNA, 20 bp, Artificial Sequence
  Probe
tggtgagtatccccgcctgt

SEQ ID NO: 55516 - DNA, 22 bp, Artificial Sequence
  Probe
tggtgagtatccccgcctgtca

SEQ ID NO: 55517 - DNA, 25 bp, Artificial Sequence
  Probe
tggtgagtatccccgcctgtcacgc

SEQ ID NO: 55518 - DNA, 33 bp, Artificial Sequence; identical to SEQ ID NO: 24417
  Probe

SEQ ID NO: 55519 - DNA, 34 bp, Artificial Sequence; identical to SEQ ID NO: 14414
  Probe

SEQ ID NO: 55520 - DNA, 38 bp, Artificial Sequence; identical to SEQ ID NO: 14416
  Probe

SEQ ID NO: 55521 - DNA, 28 bp, Artificial Sequence
  Probe
tggtgctaataacgccaaggtcgcgggt

SEQ ID NO: 55522 - DNA, 29 bp, Artificial Sequence
  Probe
tggtggttcagtggtagaattctcgcctg

SEQ ID NO: 55523 - DNA, 31 bp, Artificial Sequence; identical to SEQ ID NO: 8197
  Probe

SEQ ID NO: 55524 - DNA, 26 bp, Artificial Sequence
  Probe
tggtgtagtggtatcatgcaagattc

SEQ ID NO: 55525 - DNA, 27 bp, Artificial Sequence
  Probe
tggtgtagtggtatcatgcaagattcc

SEQ ID NO: 55526 - DNA, 32 bp, Artificial Sequence
  Probe
tggtgtagtggtatcatgcaagattcccattc

SEQ ID NO: 55527 - DNA, 42 bp, Artificial Sequence
  Probe
tggtgtagtggtatcatgcaagattcccattcttgcgacccg

SEQ ID NO: 55528 - DNA, 27 bp, Artificial Sequence
  Probe
tggttagcactctggactctgaatcca

SEQ ID NO: 55529 - DNA, 34 bp, Artificial Sequence; identical to SEQ ID NO: 24440
  Probe

SEQ ID NO: 55530 - DNA, 34 bp, Artificial Sequence; identical to SEQ ID NO: 14427
  Probe

SEQ ID NO: 55531 - DNA, 21 bp, Artificial Sequence
  Probe
tggttaggattcggcgctctc

SEQ ID NO: 55532 - DNA, 25 bp, Artificial Sequence
  Probe
tggttaggattcggcgctctcaccg

SEQ ID NO: 55533 - DNA, 30 bp, Artificial Sequence; identical to SEQ ID NO: 24444
  Probe

SEQ ID NO: 55534 - DNA, 31 bp, Artificial Sequence; identical to SEQ ID NO: 24445
  Probe

SEQ ID NO: 55535 - DNA, 38 bp, Artificial Sequence; identical to SEQ ID NO: 24448
  Probe

SEQ ID NO: 55536 - DNA, 16 bp, Artificial Sequence
  Probe
tggttagtactctgcg

SEQ ID NO: 55537 - DNA, 18 bp, Artificial Sequence
  Probe
tggttagtactctgcgtt

SEQ ID NO: 55538 - DNA, 16 bp, Artificial Sequence
  Probe
tggttcagtggtagaa

SEQ ID NO: 55539 - DNA, 23 bp, Artificial Sequence
  Probe
tggttcagtggtagaattctcgc

SEQ ID NO: 55540 - DNA, 24 bp, Artificial Sequence
  Probe
tggttcagtggtagaattctcgcc

SEQ ID NO: 55541 - DNA, 25 bp, Artificial Sequence
  Probe
tggttcagtggtagaattctcgcct

SEQ ID NO: 55542 - DNA, 26 bp, Artificial Sequence
  Probe
tggttcagtggtagaattctcgcctg

SEQ ID NO: 55543 - DNA, 27 bp, Artificial Sequence
  Probe
tggttcagtggtagaattctcgcctgc

SEQ ID NO: 55544 - DNA, 28 bp, Artificial Sequence
  Probe
tggttcagtggtagaattctcgcctgcc

SEQ ID NO: 55545 - DNA, 31 bp, Artificial Sequence; identical to SEQ ID NO: 35269
  Probe

SEQ ID NO: 55546 - DNA, 32 bp, Artificial Sequence; identical to SEQ ID NO: 24464
  Probe

SEQ ID NO: 55547 - DNA, 33 bp, Artificial Sequence; identical to SEQ ID NO: 24465
  Probe

SEQ ID NO: 55548 - DNA, 41 bp, Artificial Sequence; identical to SEQ ID NO: 8211
  Probe

SEQ ID NO: 55549 - DNA, 45 bp, Artificial Sequence; identical to SEQ ID NO: 35271
  Probe

SEQ ID NO: 55550 - DNA, 50 bp, Artificial Sequence; identical to SEQ ID NO: 8215
  Probe

SEQ ID NO: 55551 - DNA, 23 bp, Artificial Sequence
  Probe
tggttcgaatccggctcgaagga

SEQ ID NO: 55552 - DNA, 25 bp, Artificial Sequence
  Probe
tggttcgaatccggctcgaaggacg

SEQ ID NO: 55553 - DNA, 23 bp, Artificial Sequence
  Probe
tggttcgattccggctcgaagga

SEQ ID NO: 55554 - DNA, 25 bp, Artificial Sequence
  Probe
tggttcgattccggctcgaaggact

SEQ ID NO: 55555 - DNA, 26 bp, Artificial Sequence
  Probe
tggttgtagtccgtgcgagaataatg

SEQ ID NO: 55556 - DNA, 21 bp, Artificial Sequence
  Probe
tgtaaacaggagatcctgggt

SEQ ID NO: 55557 - DNA, 22 bp, Artificial Sequence
  Probe
tgtaaacaggagatcctgggtt

SEQ ID NO: 55558 - DNA, 38 bp, Artificial Sequence; identical to SEQ ID NO: 8222
  Probe

SEQ ID NO: 55559 - DNA, 39 bp, Artificial Sequence
  Probe
tgtaaaccggagatgaaaacctttttccaaggacaaatc

SEQ ID NO: 55560 - DNA, 29 bp, Artificial Sequence
  Probe
tgtaaatatagtttaaccaaaacatcaga

SEQ ID NO: 55561 - DNA, 43 bp, Artificial Sequence; identical to SEQ ID NO: 8233
  Probe

SEQ ID NO: 55562 - DNA, 44 bp, Artificial Sequence; identical to SEQ ID NO: 8234
  Probe

SEQ ID NO: 55563 - DNA, 45 bp, Artificial Sequence; identical to SEQ ID NO: 8235
  Probe

SEQ ID NO: 55564 - DNA, 46 bp, Artificial Sequence; identical to SEQ ID NO: 8236
  Probe

SEQ ID NO: 55565 - DNA, 50 bp, Artificial Sequence; identical to SEQ ID NO: 8238
  Probe

SEQ ID NO: 55566 - DNA, 21 bp, Artificial Sequence
  Probe
tgtaatggttagcactctgga

SEQ ID NO: 55567 - DNA, 23 bp, Artificial Sequence
  Probe
tgtagcggttatcacattcgcct

SEQ ID NO: 55568 - DNA, 24 bp, Artificial Sequence
  Probe
tgtagcggttatcacattcgcctc

SEQ ID NO: 55569 - DNA, 25 bp, Artificial Sequence
  Probe
tgtagcggttatcacattcgcctca

SEQ ID NO: 55570 - DNA, 27 bp, Artificial Sequence
  Probe
tgtagcggttatcacattcgcctcaca

SEQ ID NO: 55571 - DNA, 29 bp, Artificial Sequence
  Probe
tgtagcggttatcacattcgcctcacacg

SEQ ID NO: 55572 - DNA, 22 bp, Artificial Sequence
  Probe
tgtagtccgtgcgagaataatg

SEQ ID NO: 55573 - DNA, 38 bp, Artificial Sequence
  Probe
tgtagtggtatcatgcaagattcccattcttgcgaccc

SEQ ID NO: 55574 - DNA, 23 bp, Artificial Sequence
  Probe
tgtagtggtcatcacgttcgcct

SEQ ID NO: 55575 - DNA, 23 bp, Artificial Sequence
  Probe
tgtagtggttatcacgttcgcct

SEQ ID NO: 55576 - DNA, 25 bp, Artificial Sequence
  Probe
tgtagtggttatcacgttcgcctca

SEQ ID NO: 55577 - DNA, 39 bp, Artificial Sequence; identical to SEQ ID NO: 24490
  Probe

SEQ ID NO: 55578 - DNA, 22 bp, Artificial Sequence
  Probe
tgtcacgcgggagaccggggtt

SEQ ID NO: 55579 - DNA, 23 bp, Artificial Sequence
  Probe
tgtcacgcgggagaccggggttc

SEQ ID NO: 55580 - DNA, 43 bp, Artificial Sequence; identical to SEQ ID NO: 8254
  Probe

SEQ ID NO: 55581 - DNA, 43 bp, Artificial Sequence; identical to SEQ ID NO: 8257
  Probe

SEQ ID NO: 55582 - DNA, 43 bp, Artificial Sequence; identical to SEQ ID NO: 8271
  Probe

SEQ ID NO: 55583 - DNA, 21 bp, Artificial Sequence
  Probe
tgtgctccggagttacctcgt

SEQ ID NO: 55584 - DNA, 22 bp, Artificial Sequence
  Probe
tgtgctccggagttacctcgtt

SEQ ID NO: 55585 - DNA, 23 bp, Artificial Sequence
  Probe
tgtgctccggagttacctcgttt

SEQ ID NO: 55586 - DNA, 24 bp, Artificial Sequence
  Probe
tgtgctccggagttacctcgtttt

SEQ ID NO: 55587 - DNA, 39 bp, Artificial Sequence; identical to SEQ ID NO: 51038
  Probe

SEQ ID NO: 55588 - DNA, 44 bp, Artificial Sequence; identical to SEQ ID NO: 8278
  Probe

SEQ ID NO: 55589 - DNA, 26 bp, Artificial Sequence
  Probe
tgtttgtgggtttaagtcccattggt

SEQ ID NO: 55590 - DNA, 36 bp, Artificial Sequence; identical to SEQ ID NO: 24564
  Probe

SEQ ID NO: 55591 - DNA, 39 bp, Artificial Sequence; identical to SEQ ID NO: 8298
  Probe

SEQ ID NO: 55592 - DNA, 31 bp, Artificial Sequence; identical to SEQ ID NO: 8301
  Probe

SEQ ID NO: 55593 - DNA, 32 bp, Artificial Sequence; identical to SEQ ID NO: 8302
  Probe

SEQ ID NO: 55594 - DNA, 33 bp, Artificial Sequence; identical to SEQ ID NO: 8303
  Probe

SEQ ID NO: 55595 - DNA, 34 bp, Artificial Sequence; identical to SEQ ID NO: 8304
  Probe

SEQ ID NO: 55596 - DNA, 35 bp, Artificial Sequence; identical to SEQ ID NO: 24571
  Probe

SEQ ID NO: 55597 - DNA, 40 bp, Artificial Sequence; identical to SEQ ID NO: 8305
  Probe

SEQ ID NO: 55598 - DNA, 49 bp, Artificial Sequence; identical to SEQ ID NO: 1784
  Probe

SEQ ID NO: 55599 - DNA, 50 bp, Artificial Sequence; identical to SEQ ID NO: 1785
  Probe

SEQ ID NO: 55600 - DNA, 35 bp, Artificial Sequence; identical to SEQ ID NO: 51068
  Probe

SEQ ID NO: 55601 - DNA, 36 bp, Artificial Sequence; identical to SEQ ID NO: 25864
  Probe

SEQ ID NO: 55602 - DNA, 38 bp, Artificial Sequence; identical to SEQ ID NO: 51070
  Probe

SEQ ID NO: 55603 - DNA, 39 bp, Artificial Sequence; identical to SEQ ID NO: 51071
  Probe

SEQ ID NO: 55604 - DNA, 40 bp, Artificial Sequence; identical to SEQ ID NO: 8307
  Probe

SEQ ID NO: 55605 - DNA, 41 bp, Artificial Sequence; identical to SEQ ID NO: 1787
  Probe

SEQ ID NO: 55606 - DNA, 42 bp, Artificial Sequence; identical to SEQ ID NO: 35397
  Probe

SEQ ID NO: 55607 - DNA, 50 bp, Artificial Sequence; identical to SEQ ID NO: 51075
  Probe

SEQ ID NO: 55608 - DNA, 41 bp, Artificial Sequence; identical to SEQ ID NO: 8308
  Probe

SEQ ID NO: 55609 - DNA, 41 bp, Artificial Sequence; identical to SEQ ID NO: 8309
  Probe

SEQ ID NO: 55610 - DNA, 40 bp, Artificial Sequence; identical to SEQ ID NO: 51078
  Probe

SEQ ID NO: 55611 - DNA, 50 bp, Artificial Sequence
  Probe
ttaaccgaaaggttggtggttcgagcccacccagggacggctgaaatttt

SEQ ID NO: 55612 - DNA, 37 bp, Artificial Sequence; identical to SEQ ID NO: 51080
  Probe

SEQ ID NO: 55613 - DNA, 49 bp, Artificial Sequence; identical to SEQ ID NO: 8310
  Probe

SEQ ID NO: 55614 - DNA, 50 bp, Artificial Sequence; identical to SEQ ID NO: 8311
  Probe

SEQ ID NO: 55615 - DNA, 33 bp, Artificial Sequence; identical to SEQ ID NO: 1788
  Probe

SEQ ID NO: 55616 - DNA, 37 bp, Artificial Sequence; identical to SEQ ID NO: 1790
  Probe

SEQ ID NO: 55617 - DNA, 38 bp, Artificial Sequence; identical to SEQ ID NO: 1791
  Probe

SEQ ID NO: 55618 - DNA, 42 bp, Artificial Sequence; identical to SEQ ID NO: 8319
  Probe

SEQ ID NO: 55619 - DNA, 21 bp, Artificial Sequence
  Probe
ttaacttgaccgctctgagct

SEQ ID NO: 55620 - DNA, 32 bp, Artificial Sequence; identical to SEQ ID NO: 8326
  Probe

SEQ ID NO: 55621 - DNA, 44 bp, Artificial Sequence; identical to SEQ ID NO: 8328
  Probe

SEQ ID NO: 55622 - DNA, 33 bp, Artificial Sequence; identical to SEQ ID NO: 8333
  Probe

SEQ ID NO: 55623 - DNA, 42 bp, Artificial Sequence; identical to SEQ ID NO: 8339
  Probe

SEQ ID NO: 55624 - DNA, 27 bp, Artificial Sequence
  Probe
ttacagtcagaggttcaattcctcttc

SEQ ID NO: 55625 - DNA, 28 bp, Artificial Sequence
  Probe
ttacagtcagaggttcaattcctcttct

SEQ ID NO: 55626 - DNA, 29 bp, Artificial Sequence
  Probe
ttacagtcagaggttcaattcctcttctt

SEQ ID NO: 55627 - DNA, 36 bp, Artificial Sequence; identical to SEQ ID NO: 24604
  Probe

SEQ ID NO: 55628 - DNA, 32 bp, Artificial Sequence; identical to SEQ ID NO: 8359
  Probe

SEQ ID NO: 55629 - DNA, 32 bp, Artificial Sequence
  Probe
ttagcatagctgccttccaagcagttgacccg

SEQ ID NO: 55630 - DNA, 50 bp, Artificial Sequence; identical to SEQ ID NO: 1795
  Probe

SEQ ID NO: 55631 - DNA, 50 bp, Artificial Sequence; identical to SEQ ID NO: 8365
  Probe

SEQ ID NO: 55632 - DNA, 36 bp, Artificial Sequence; identical to SEQ ID NO: 8373
  Probe

SEQ ID NO: 55633 - DNA, 19 bp, Artificial Sequence
  Probe
ttagggtgcgagaggtccc

SEQ ID NO: 55634 - DNA, 23 bp, Artificial Sequence
  Probe
ttagggtgcgagaggtcccgggt

SEQ ID NO: 55635 - DNA, 24 bp, Artificial Sequence
  Probe
ttagggtgcgagaggtcccgggtt

SEQ ID NO: 55636 - DNA, 23 bp, Artificial Sequence
  Probe
ttcaaatcccggacgagccccct

SEQ ID NO: 55637 - DNA, 27 bp, Artificial Sequence
  Probe
ttcaacttaacttgaccgctctgagct

SEQ ID NO: 55638 - DNA, 38 bp, Artificial Sequence; identical to SEQ ID NO: 8398
  Probe

SEQ ID NO: 55639 - DNA, 42 bp, Artificial Sequence; identical to SEQ ID NO: 8402
  Probe

SEQ ID NO: 55640 - DNA, 49 bp, Artificial Sequence; identical to SEQ ID NO: 8404
  Probe

SEQ ID NO: 55641 - DNA, 42 bp, Artificial Sequence; identical to SEQ ID NO: 8407
  Probe

SEQ ID NO: 55642 - DNA, 29 bp, Artificial Sequence
  Probe
ttccatagtgtagtggttatcacgtctgc

SEQ ID NO: 55643 - DNA, 19 bp, Artificial Sequence
  Probe
ttcccattcttgcgacccg

SEQ ID NO: 55644 - DNA, 23 bp, Artificial Sequence
  Probe
ttcccattcttgcgacccgggtt

SEQ ID NO: 55645 - DNA, 24 bp, Artificial Sequence
  Probe
ttcccattcttgcgacccgggttc

SEQ ID NO: 55646 - DNA, 27 bp, Artificial Sequence
  Probe
ttcccattcttgcgacccgggttcgat

SEQ ID NO: 55647 - DNA, 28 bp, Artificial Sequence
  Probe
ttcccattcttgcgacccgggttcgatt

SEQ ID NO: 55648 - DNA, 29 bp, Artificial Sequence
  Probe
ttcccattcttgcgacccgggttcgattc

SEQ ID NO: 55649 - DNA, 39 bp, Artificial Sequence; identical to SEQ ID NO: 42226
  Probe

SEQ ID NO: 55650 - DNA, 43 bp, Artificial Sequence
  Probe
ttcccattcttgcgacccgggttcgattcccgggcggcgcact

SEQ ID NO: 55651 - DNA, 44 bp, Artificial Sequence; identical to SEQ ID NO: 8412
  Probe

SEQ ID NO: 55652 - DNA, 49 bp, Artificial Sequence
  Probe
ttcccattcttgcgacccgggttcgattcccgggcggcgcacttagttt

SEQ ID NO: 55653 - DNA, 50 bp, Artificial Sequence; identical to SEQ ID NO: 42227
  Probe

SEQ ID NO: 55654 - DNA, 22 bp, Artificial Sequence
  Probe
ttccccgcacaggttcgaatcc

SEQ ID NO: 55655 - DNA, 16 bp, Artificial Sequence
  Probe
ttcccgggcggcgcac

SEQ ID NO: 55656 - DNA, 17 bp, Artificial Sequence
  Probe
ttcccgggcggcgcact

SEQ ID NO: 55657 - DNA, 18 bp, Artificial Sequence
  Probe
ttcccgggcggcgcactt

SEQ ID NO: 55658 - DNA, 19 bp, Artificial Sequence
  Probe
ttcccgggcggcgcactta

SEQ ID NO: 55659 - DNA, 20 bp, Artificial Sequence
  Probe
ttcccgggcggcgcacttag

SEQ ID NO: 55660 - DNA, 16 bp, Artificial Sequence
  Probe
ttcccggtcagggaac

SEQ ID NO: 55661 - DNA, 17 bp, Artificial Sequence
  Probe
ttcccggtcagggaacc

SEQ ID NO: 55662 - DNA, 18 bp, Artificial Sequence
  Probe
ttcccggtcagggaacca

SEQ ID NO: 55663 - DNA, 19 bp, Artificial Sequence
  Probe
ttcccggtcagggaaccaa

SEQ ID NO: 55664 - DNA, 23 bp, Artificial Sequence
  Probe
ttccggatcagaagattgagggt

SEQ ID NO: 55665 - DNA, 19 bp, Artificial Sequence
  Probe
ttccggctcgaaggacttc

SEQ ID NO: 55666 - DNA, 20 bp, Artificial Sequence
  Probe
ttccggctcgaaggacttcg

SEQ ID NO: 55667 - DNA, 26 bp, Artificial Sequence
  Probe
ttccgtagtgtagcggttatcacatt

SEQ ID NO: 55668 - DNA, 29 bp, Artificial Sequence
  Probe
ttccgtagtgtagtggtcatcacgttcgc

SEQ ID NO: 55669 - DNA, 26 bp, Artificial Sequence
  Probe
ttccgtagtgtagtggttatcacgtt

SEQ ID NO: 55670 - DNA, 29 bp, Artificial Sequence
  Probe
ttccgtagtgtagtggttatcacgttcgc

SEQ ID NO: 55671 - DNA, 30 bp, Artificial Sequence; identical to SEQ ID NO: 8425
  Probe

SEQ ID NO: 55672 - DNA, 35 bp, Artificial Sequence; identical to SEQ ID NO: 8437
  Probe

SEQ ID NO: 55673 - DNA, 36 bp, Artificial Sequence; identical to SEQ ID NO: 8438
  Probe

SEQ ID NO: 55674 - DNA, 39 bp, Artificial Sequence; identical to SEQ ID NO: 8444
  Probe

SEQ ID NO: 55675 - DNA, 22 bp, Artificial Sequence
  Probe
ttcgagtctcggtggaaccttt

SEQ ID NO: 55676 - DNA, 23 bp, Artificial Sequence
  Probe
ttcgatccccggcatctccattg

SEQ ID NO: 55677 - DNA, 19 bp, Artificial Sequence
  Probe
ttcgggtgcgagaggtccc

SEQ ID NO: 55678 - DNA, 23 bp, Artificial Sequence
  Probe
ttcgggtgcgagaggtcccgggt

SEQ ID NO: 55679 - DNA, 24 bp, Artificial Sequence
  Probe
ttcgggtgcgagaggtcccgggtt

SEQ ID NO: 55680 - DNA, 37 bp, Artificial Sequence; identical to SEQ ID NO: 8466
  Probe

SEQ ID NO: 55681 - DNA, 16 bp, Artificial Sequence
  Probe
ttctcgcctgccacgc

SEQ ID NO: 55682 - DNA, 26 bp, Artificial Sequence
  Probe
ttgacaacattcaaaaaagagtaata

SEQ ID NO: 55683 - DNA, 45 bp, Artificial Sequence; identical to SEQ ID NO: 8473
  Probe

SEQ ID NO: 55684 - DNA, 43 bp, Artificial Sequence; identical to SEQ ID NO: 8477
  Probe

SEQ ID NO: 55685 - DNA, 22 bp, Artificial Sequence
  Probe
ttgggtccgagaggtcccgggt

SEQ ID NO: 55686 - DNA, 23 bp, Artificial Sequence
  Probe
ttgggtccgagaggtcccgggtt

SEQ ID NO: 55687 - DNA, 18 bp, Artificial Sequence
  Probe
ttgggtgcgagaggtccc

SEQ ID NO: 55688 - DNA, 22 bp, Artificial Sequence
  Probe
ttgggtgcgagaggtcccgggt

SEQ ID NO: 55689 - DNA, 23 bp, Artificial Sequence
  Probe
ttgggtgcgagaggtcccgggtt

SEQ ID NO: 55690 - DNA, 41 bp, Artificial Sequence; identical to SEQ ID NO: 8481
  Probe

SEQ ID NO: 55691 - DNA, 29 bp, Artificial Sequence
  Probe
ttggtggttcagtggtagaattctcgcct

SEQ ID NO: 55692 - DNA, 32 bp, Artificial Sequence; identical to SEQ ID NO: 8493
  Probe

SEQ ID NO: 55693 - DNA, 22 bp, Artificial Sequence
  Probe
ttgtaaacaggagatcctgggt

SEQ ID NO: 55694 - DNA, 23 bp, Artificial Sequence
  Probe
ttgtaaacaggagatcctgggtt

SEQ ID NO: 55695 - DNA, 34 bp, Artificial Sequence
  Probe
ttgtaaaccggagatgaaaacctttttccaagga

SEQ ID NO: 55696 - DNA, 35 bp, Artificial Sequence; identical to SEQ ID NO: 1799
  Probe

SEQ ID NO: 55697 - DNA, 36 bp, Artificial Sequence; identical to SEQ ID NO: 1800
  Probe

SEQ ID NO: 55698 - DNA, 37 bp, Artificial Sequence; identical to SEQ ID NO: 8497
  Probe

SEQ ID NO: 55699 - DNA, 38 bp, Artificial Sequence; identical to SEQ ID NO: 8498
  Probe

SEQ ID NO: 55700 - DNA, 39 bp, Artificial Sequence; identical to SEQ ID NO: 8499
  Probe

SEQ ID NO: 55701 - DNA, 40 bp, Artificial Sequence; identical to SEQ ID NO: 8500
  Probe

SEQ ID NO: 55702 - DNA, 41 bp, Artificial Sequence; identical to SEQ ID NO: 8501
  Probe

SEQ ID NO: 55703 - DNA, 44 bp, Artificial Sequence; identical to SEQ ID NO: 8503
  Probe

SEQ ID NO: 55704 - DNA, 44 bp, Artificial Sequence; identical to SEQ ID NO: 8511
  Probe

SEQ ID NO: 55705 - DNA, 35 bp, Artificial Sequence; identical to SEQ ID NO: 8515
  Probe

SEQ ID NO: 55706 - DNA, 45 bp, Artificial Sequence; identical to SEQ ID NO: 8516
  Probe

SEQ ID NO: 55707 - DNA, 50 bp, Artificial Sequence; identical to SEQ ID NO: 8517
  Probe

SEQ ID NO: 55708 - DNA, 27 bp, Artificial Sequence
  Probe
tttacagtcagaggttcaattcctctt

SEQ ID NO: 55709 - DNA, 28 bp, Artificial Sequence
  Probe
tttacagtcagaggttcaattcctcttc

SEQ ID NO: 55710 - DNA, 29 bp, Artificial Sequence
  Probe
tttacagtcagaggttcaattcctcttct

SEQ ID NO: 55711 - DNA, 30 bp, Artificial Sequence; identical to SEQ ID NO: 24800
  Probe

SEQ ID NO: 55712 - DNA, 31 bp, Artificial Sequence; identical to SEQ ID NO: 24801
  Probe

SEQ ID NO: 55713 - DNA, 33 bp, Artificial Sequence; identical to SEQ ID NO: 8521
  Probe

SEQ ID NO: 55714 - DNA, 34 bp, Artificial Sequence; identical to SEQ ID NO: 24803
  Probe

SEQ ID NO: 55715 - DNA, 36 bp, Artificial Sequence
  Probe
tttacagtcagaggttcaattcctcttcttaacaac

SEQ ID NO: 55716 - DNA, 37 bp, Artificial Sequence
  Probe
tttacagtcagaggttcaattcctcttcttaacaaca

SEQ ID NO: 55717 - DNA, 28 bp, Artificial Sequence
  Probe
tttcaacttaacttgaccgctctgagct

SEQ ID NO: 55718 - DNA, 27 bp, Artificial Sequence
  Probe
tttccgtagtgtagcggttatcacatt

SEQ ID NO: 55719 - DNA, 27 bp, Artificial Sequence
  Probe
tttccgtagtgtagtggttatcacgtt

SEQ ID NO: 55720 - DNA, 30 bp, Artificial Sequence; identical to SEQ ID NO: 24813
  Probe

SEQ ID NO: 55721 - DNA, 31 bp, Artificial Sequence; identical to SEQ ID NO: 24814
  Probe

SEQ ID NO: 55722 - DNA, 46 bp, Artificial Sequence; identical to SEQ ID NO: 8532
  Probe

SEQ ID NO: 55723 - DNA, 19 bp, Artificial Sequence
  Probe
tttgggtccgagaggtccc

SEQ ID NO: 55724 - DNA, 24 bp, Artificial Sequence
  Probe
tttgggtccgagaggtcccgggtt

SEQ ID NO: 55725 - DNA, 19 bp, Artificial Sequence
  Probe
tttgggtgcgagaggtccc

SEQ ID NO: 55726 - DNA, 23 bp, Artificial Sequence
  Probe
tttgggtgcgagaggtcccgggt

SEQ ID NO: 55727 - DNA, 24 bp, Artificial Sequence
  Probe
tttgggtgcgagaggtcccgggtt

SEQ ID NO: 55728 - DNA, 42 bp, Artificial Sequence; identical to SEQ ID NO: 24831
  Probe

SEQ ID NO: 55729 - DNA, 32 bp, Artificial Sequence
  Probe
ggggaattagctcaagtggtagagcgcttgct

SEQ ID NO: 55730 - DNA, 32 bp, Artificial Sequence
  Probe
ggggaattagctcaagcggtagagcgcttgct

SEQ ID NO: 55731 - DNA, 32 bp, Artificial Sequence
  Probe
  misc_feature (17)..(17): n refers to any nucleotide a, c, t, or g
ggggaattagctcaagnggtagagcgcttgct

SEQ ID NO: 55732 - DNA, 22 bp, Artificial Sequence
  Probe
gggggtgtagatcagtggtaga

SEQ ID NO: 55733 - DNA, 22 bp, Artificial Sequence
  Probe
gggggtgtagctcagtggtaga

SEQ ID NO: 55734 - DNA, 24 bp, Artificial Sequence
  Probe
gctccagtggcgcaatcggttagc

SEQ ID NO: 55735 - DNA, 38 bp, Artificial Sequence
  Probe
gctccagtggcgcaatcggttagcatgcggtacttata

SEQ ID NO: 55736 - DNA, 72 bp, Artificial Sequence
  Probe
tcctcgttagtatagtggtgagtatccccgcctgtcacgcgggagaccggggttcgattccccgacggggag
